United States Patent Application Publication US 2023/0003719 A1 - sequence listing, part 3

SEQ ID NO: 143 - DNA, 967749 bp, Homo sapiens
gcactttcttctcagcgccgggcgggggcggcggcggcggcggctcctccgcgcccggcggacccctcggagctagcgcggcgggctcgggactgcgtgagcgccggacgcgaatttcccccgttgacaacttcttctcgcccggctcgtccccggcccgcgccgcgcccctcacgcggggacccaggacgccgcccctcagcgctgggcggccgctcacctcgggccggggggcgccgcgcctcccgcggagtggccgcgcccgctcggagccgtcccgcctgtcctgcccgcccgtccgtccggcgcggcgctcggggtggcggctgctcggcatggcccggggcgcccggccctcggcggccggtggcggcggcggcggcgcggagccccctgagcgcgcgggccccgggcggccgcggggatccccgcccggccgcgcccgcccctcgctggcgccgcgccccggcccggagccctcgcgaccccgggcggcgcccgagacctccggcggggacacggcgggcgcggggcggtgcggcgggcggcgggcggcaaagttggggccgggccgccgcggctggtgggcgctgctggcgctgcagctgcacttgctccgggcgctggcgcaaggtaggtgcgcgcggggtcgcgggccgggggcgtcgcctcggggcgcggaggcgcgaacttgagcagcgagagtgtgtccggggtccccccgcttcccggcccgggtcgggatgcgccttgctgggggctctagggagcccaggggctcctccacgccagactcggaggagagggaaacggagccccgtagagcctgcaccccgtctgctactttgcgttttattttttttataccgcagtagcacaaacaaaaatttttaagttgaggacccatttctcagctccttaaaaggatgcccgagtccccttcccattgcatggatgaaaaaggggctggtctgtacctgagtcttcgcaccgcagggtctggtttccggtgagtgacatccagaagacttggaaatatcaagtgccagtcgctgtgaaaagccttttccagcccctccccagggcctcgtcctctccccagcccccgcctgctcctgactcccccaagtcccaaagcccgaccccaagtgggtgctgcgcggccggtggagcaaaactttcagtgcccacagcttttgcacttggctttgtttttctccctctattggcttctgtttagaatacagtggtgagctctgaaatagggaaagaggatctgctgaatggaaatgaccttttgaaacgagagatgggatctcttgtgaaacgagctttccttcccaaatctgggcttccctccaccccctccccgcccccgacaaaacccgtaacgtacccctgccagctagcatcgttttcttttgaagtttgctggtctttaaaccaaaacacccccctcaacccagaaataactattttaatacgtcctttggtaacgtctttaaaacacattagtgaactggttttgctgatggtagttttaggaaaattaacttagttgtattccaagatacagctaacgaacaatcatggtaaggaactcgatattctgagattggcgaagatgagagcattaaacttaaattagctgtgttctgtgtcctgtgaagatgatttatgtgtagtaacatgacttaaatgttgtaacattttaaaggtctgagctcaaaactatcatccaatagcttaacaacgaactcatacttttttttattgatgcttatgtaacgttatctaaattgtgcccctccacccccctccagctttcataaatgctccctcttatgttttactacatgaaaacaaattgccatatttctggttaatttaactcctccattacttggaaaattttcatttcacttatttgtgctttttgcttaatgacttactctggaagaaaagcatttattaagtcattttgtacagtgggatctgtagattgttagagcaaccaggttcaagtgaagaaatctaaatcacttaggatgacctttaaaataatgtgtttattaagttttctttttttaaacagtgacttgcattttgcactaagacctgtacgttcatacatttgaagattggtgcacagactgaaatggtggggaaaaaatctgccagtggctttgttttgaagtatattacatagatttcaagtttttatcagttgcactttgaaggttgtgtaaagcattgcattttaacaactgaaatgttaatgaaaatacattttaaaaatatattaaggcaacaaccgaactttgttaggaatattttattcctttttggcagtaaaaacattggtacctgttttacatttatatggcttatgaaagtgtacagatcttttagtgtaaaatttcagataggttgtcacaaattttaagttcattgacgggtttctgttctctttgctctgtgaaatgtgtaatatatccatctttttttatatcgtattgaaaattcatattacagaggagatgtcaccatttgacaaaagctcatgtatcttgaaaatgaaaattctggtgctgttataagagatttctgatgggatgatgagttggtcatatgtgcaggagtgcattctcttgaatcttatcagatgtaacattctaaatggaatagttaccactacgttggagcgcctcctaagtaccatattattacattgtagctaggtgaagctatgactaatttctctgcacctcatgtaagtaggctaggtcgtgtattttgagaaaaaacgtgcgacattgatcagtaaaagttacatttttataacctaggttacagaccctctatgtaactgatcatgatgggaaccgccaggttcaggtcttccaaatgtaactttaatatgccctggagtttcttctttctatgcggtgatgagaatttctgagttgtatgctctgcttattgctgtgtgtttaattgcttgtgactttcccggattcctaaaaagccaagtctttaattctggaaggcaggtggcaacacatgctttctttatgccatccaccaaggagccagctgtgagtggtttggaaggatgacttctgaggctaaagatgtataagcagtcttatgtgtgaagtccgtggtgcctttagctttactgctggactctttacaggcttactgattctggcagtgttcagtagacctcctagattcagcttgcattcctcaggcctagaaaggataggaatgttcttgtccatggggctgtttgttcatagtcctcagtttctcatttgaaattgtctccacttggacctatggttctccagctttggtatgtgttagaatcacctggggaatttgatgaagctgtagagtacctactcttcctcttccatgagccacatttgctttccatgtgattataatacacattggaattcgagaactactcacttattaccttgtgtttccccctattccagacacctgctgacttcctggaaactctctagcccagtgtttctcaaacttggttgcacattggaatcacctggagctttaaacttctgatgcctggatgtcactcctagaattggttttaataaacttgaggtttgatctgggcatcaggatgctgagacaccccctcctccctccaggtgattctcatgtttagccaagtttgagaaccactgctctaatggttttacgtgaggccacatggcttgatttccctttcatgccttcctgggcttattgtcctcccccaacaattgcagtgacttttatggaccttgggcctgtgttcacttacacctgttccaggttcatgatttgaaactcaacagagtacactagcttttcacttatgtatcgtttattcctactgaaactgttgagcccctgctttgtgctgcctgaggtgtacatcggaatcactggtgaaaatttaaaatacagttatctggactccacctcagaccagttggttctcagaagcatgcatttaaaaactcctcaagtgattcttgtatgtttgtgttactttttttattttttatttttaatcctcgtgttggttaatcccataatgtcactcaatttctctgtcatccttagcctgatttttctgtggtctgggtcacttttctcaggccaattcccagccttggacagggtgtactaattaggcatttctgccacttgtttgctagagtgttgagttcactacaaatctagcttccttttgggcccatgttgctttccattaatccagaagtactttgcttcccctcctcctaacctactccctttacaactttgtaatttgagtttcaactggaacttgagttctagactcccttacttgaatatcatcttaataaagagtcttgcttagtgagtgctcagatagttaattaaattttattaggccactgggtatttaacagacaactggtctcttggttggttactgtcttccaaatccaacaataagcagttattaccctctatgcagtctgcatagccacctgtagctgtcctttattgaacctttacgtgccaagcactaagtgctcatttattcttcacagcagctcctgagaggtagacagcatttttgttctcatcttacctatgggaaaactgaggcattcagatgttaactaactttcctgaggtcccaggaccaggagtggtgatgccagaatgaaaagtctgatccagagtctgaacataacttgagttcataacccctgggctggagcgtttcccatgtagcctctgcctttataaggagagggaaaaatgggcagcaatcagatctgtaccaaagggaaagacggtggttgatattttctaaaaacagtattgagtaatctgacctcaagttttagataaaccttatttacgattatgattgcaaaataaaaattacataatttggaaaatagagatgagggatgtatgtaaccccttccatctacacattcgtctcctctaagaaaatgactatcaccattttgatgtattcccctaccccaatttttctttcataacataacatgaattccagcttcatgatggtctgttggcagagattagaccaccccagaatggactactgggagtgcaccaactatttatttgaggaacatttggaaaattcttttatctgcactgaagtgtatgaatttgagtcctttaactaaaggaggtggagtttgtaaggtactgatcttttattagtttgccttagcacacattttatgtaaacagttaagtttaggctatactggggtttatacctaaccagaagtttcctgggccctcaaatactgagataaaacaacgtggaaggctgcaagttaagtgggtaattaagtgatatcaggtaagactgtgtagtttaattctccctaccagttgcctttatgttatttccatcctcagagcccctgtattgcttgtattggaatacataggatttggcgtctaaggtggcagaggtgtgtggcatgtagtgtctttctgcctgcctgccttacggtgtcccagagatcagagactggtaatgtcagctgactgaaactagagaatggaatggacacaaagtgaggattctgattaggtcacggcttaaatttctctaagaagtaaagaaagtggtagttatgagagtagacctccaggtccaaatgcgttgaaagttgaattaagctcaaggtggggaatgaaaatcacattgaaaggtgtagtataaagaaaaattaaggtttatttacaaaagaaagctattgatgttttgttatttgattaaatactcctggtacccaattatacatttaacccaaagtaaccgagcattttaatttgcatagtttctaaaattttatttgacttcatttctgtaaggcattatcttaaatttccccctaagtatgtacacctcttttttttaaaaaaagggcataaacgttcgtagccataatcctgagggaggacatattttgtcagttgggacagcaaatatggcacctcctgccatcctatggtagcaagtagaaagaagctataggttcttcagtgaatccctgaaatgcaaaagtctgtcacagttagatacctacctgccagttattgatcctatacctgagatctgttctggagaggttactactcttagagcttcattatgtgaacagtgttgccactaaatccaaatacaaaaatcatgattattatgggagcattgctgtagggaacccttgtttatgtatgtgcaattctagtgtttaggtggttggcttcctgacagaaagctccaaagccagaaactcattccatcagcctgataccaatctcctgtgggtattgtgggaatgaaagcagtttttataaagctttcctagaaacatggatatagtaaatggaaaagacattgggctaagtatcagtaggcctcgtttatacttcattctgtaactactgtgcaatatgaggaagtctattagtctctctgagtctgttttctcacctataaaaggagggattagactagatgttcagaattgttctactctgattctctgatcttctatatgttgtcttcctttctgcccttcactagagtctgcatgtgtctcctgtctggggattctgtaactccatatgtcttagcttagaacctaattttcttcattttacttttctcagagtatttacaatgttgaagacaactaagatgcaatgtagtatttctccttaggtgctgccgtctaacacatgatatatttactctagcctaaaaatggttcatgttcaaaattttaggttctgtaaaacaaattggtgccataatttatcagtataagcctgaaatttggagaaataaattttcttaaaatgtgagatgcttatttatatacatggctggaagaaggggcaaggctaacaaatctggaggtaattaatgcagtgagaaacttaaaaagatatgagaaaatggcgatggatgagaatgtttatatttactgtacagtgaccatcagtaatgaaagagattagtagatgtctgtttttgtgcttaacataatgttatgttggtttaattgtcttcattaggggcttttagtaaaacaaagggtctttaaaattaacacagtaatttttcactttaacaggcttaactggcactttattgatatacagacaatgtctagtgaagataacagctatcaattaaatagtccaatttcttgaaaacagatagtcaggtaaatctatttctgatttttggagattaggtagatgaacatgggtaagactatagtttctgcagtgtttttggctttggttcattttcaaaaaaattttttttaaatggataaggctaggctttagagttgtgggttcaaagaatgggctagaccctggggtccatattattacgtagaattagtctttgtgcagtgtttggttgccttttctcctttctataactctccatggtattctagacctaattctttaccttgagggggttggaagctctcaagtgtgtaagcttaattttacaacgatgaatagtctttccaatgagaaaaaaatagagggagataaccacgtaatgactatggtgatttggggaggaatatggaaacttggggagctctggtagttgcctttattaagaatagttggtagcaggaattttagcaacccaagcaggctaattagaatatatttcagttttagagtaaggagggattttgtatcataaaggtataacctatcatacttaactaagggtgctgatttccacaggtggtagtatttgtgagtccctctctctggtgtgatccttaatttattttgtgtgtttgtgagcctgttttcaaagtgaaggtcagttttgtcttctctctaggtgttaggcgcgatgcaaaaagaatgaaagagattttgatagggtatgaccaagcccttctatacaatggatgtcagtgttgatttttatacacaaaccaccagatggcaacagaaaaagtgttcatataggatataatctgtggtttccacagccaagttttttttttttttccttccatgattcaccactttttagtatgcttaggtaacatgtacaatttctggctaagagcaaggcgagtttataatacccagctatgtgaaatcaaaaccaggtaatagaatagtggcagagtgtcactagaaaaagattttttttttttttttttacatgagtgtataaactgttcccaaagggagcaagtttccagggatgcaactttgatttatattattgtatagtcatgcttttacttctgattttttttattcagcatttattcagctcttacagtaagctgtaatgatttgcagaacataaaagaaaacatggctgttaccctaaagcattttatgtaacacctttaaaaggaagagatacatgagttcacaaacattaagcatatttatgtatttgccggccaaaggtatttttactctatgtagaatttgttttatttttgccttgtaggcatattccctttttctaagcgtgctgtcttggctcttctaaaatggttgtcttagctaaaactcctggttgcaagctagaaactcagtctgaactacttaagaaaaaaaggattttattgtaggagtcctggggtatcacagtataattaggagaatttctttacatttggcaagtttagtattcacttccacctagggaataactagagccacatgctcaaaagctcccgggtactgtccttttggccatcatctctcagtttgcttctgtgtctgtgctggcatcattctggattcactggaaattgctttctttttgtggctgaaacccagctgtcaccactctttgcattcctattgcttcagaccctcaaagatagacttaaagctttggtgctgagtccaaaatctgtgaaatgatcagatttgtattttaaagtcatcttgagtggggggaataaaccattatttttgttgcaaaattgagaatgggttggaagaaaccagaatgaatgactgtagatgtgttggactgtaacaacaattgaggtgagagaaagtagcagcttgggctaggtggtggtgctggagatggagagaggtagatgcactagagagggatttaagaggcaaaaaatacatgggatttggtcatgggttgggtatggaaggtgaatgagaaaacatcaaaggtgacgtccaggtttctggcttgcatgactagttggctagtataaccattcactgaggttggaccacctctgggcagcatgatcattagtttggttttgaatttattaatgtgagggacctttgaggcatctagacagagctgttaagttgtgtggatagatgaattttgcaaccagaggagggtctgggcttttggtataaatatttgtggagacagtatagcatactgtttaagaggataggcttggcataaaataaaacaaagttaaccacttgctagctttgcatccttgggttggctacttaatcttcattaatcttgacttttcttatccctgaagaattgtgtaatgattctgcctgcttcctgtagttgttgtgagggctgattgatatgattgtaggtaaggtgtttttatcgcattaccaagtacatagcatgcatccagtaagtgttaggtggtgttatttattcttttgtgtagaggaatcctgccttatttatcttttcttttcctgtaatattagggagtgatgagtcacggtagtagagtggggagtatggacagttgacataactggagaggtattatactaatattagcctggctgggatacaacctggataaattgcagggcgatgggcctggggggagagtagagtgatggagatgagttagggaatggttatgataatatagaaataatatttgaactgcagtagtattgggatggaaaaaatggaatggtcagtcttgcttagagaggtaaatagatgagaacaaaaggccattggatttgttgattacatgggtaatggtgatctttttgagctcaatctcactggagttctaggagtataaagtagattgaagttcattatggaatgaatgggtagggagaaaagagtcaaccggtatgttcttgttctattgaaattctcaaggaaagagaactatggaggcatttgaaatgcatagtgacaaaaatgatcttaaaataccttgggaatattttttccaaatttgaaatctattattgaggctgggaaaaaaaattgtcatttggcagaatggtaagtaattatcacaattctctgaagtgatcatttctgtttcatatgttgcgactcgtggaggcttctagcaacattgtcaccaaagctgaatgtggaggactcccttcaccaccctgctataaacacacagaaactgtggacaaaatataacaagaacaaacaagcgtttctgaagtttaaaataccagggaatccctaggtgccagctatgaacagaaaattcagagctagggcgttaatcaggagctcaaggcctgtggtggtttctgatctgaatacacgccccaatggcttagtcctgagggtctcatggaggagtaggaggcatggccttgggtctgcatagacttggaaggtggagtaaaggttctctagcatcaaaccttgaagggcttttccatctgtgaaaagagaactagaaaaactttgcctactggtttgggaaagtgtaggaaacttgctgtcctcctggggttgtgatcattaggaataaaaaagggacatctaaactccaagattgcacctcataattggggtggattcaaatttaacatttcttatagtgcaactaaccttcaagctgagacaaattagcataaaatctggtctagaactatggaaatgaatagagccctcaggtctgaaactgacctgcagagcaaattaaaaatctaagactcttgcagaagaaacaagtcatgctatagatgagcttgcaatacaaaaattgcccagctacacaaggaaatgaatcaccgtgaaggagagttagcagatgaatagtattccaggagattgagatgataggatatatgaaagagattaattgcttaaaattatgagagatgaaaggggtaagatcataatgaaagagcacagattagaaaaataacatggagttggaaaagaacccagtaggacttctagaaatgaaaataatggtcattaagtgtttttttttaaaaaaaataacctcaatggacaggttaaagagccaggtagatataattgaagataaaaactgtattgaaaaatcaatagatttttaaaggagatctgaggaaatttcttcgaatacagtaataagggataaagaaatggaaaatgagtggttacaattcatgaactttagaatgaggaagtctcatattaccttctgtgagcttccagaaagaggaaatagagtaggagagacactattagaagatagaatggctgagaagttttcataatcaatacaagttctgcctgagctcttagtttcaagaaccgtagtaaaccccacacaggataaataaaaataaattcatacctagacatattgtagatgaagccttagaaaataagaggaaagcagtctgaggaaagttgatgtctagactggcaggcattttgttcatagcagaagatgattgaataataacatcaaaggctggaagtggaaatccactaccaacctagaattccatgtccatataaagtattatgatactcaagagtaaatgaaatggctgggtgtggtggctcatgcctgtaatcccagcactttgggaggccaaggtgggcagatcacgaggtcaagagatcgagaccatcctgaccaacatggtgaaatgccatctttactaaaaatacaaaaattagctgggcacagtggcatgcacctgcagtcccagctacttgggaggctgaagcaggacaattgcttgaaccctggaggcggagattggagtgagctgaggttgcgccattgtattccagcctggcgacggagcgagactccatctcaaaagtaagtgaaataaaggttgtagataaaaaacaaagttgatgattagtagttggaactactaaaaaatgcacttcaaaaagaaagaaattgaacccaggagtgaggtacagattgtaaagtgctaaatgataggaagcattgttgcaatgtgccccttaaatttatatgtaattgctttgcagtttgagaaaagtgtcagcagtttccactacaagtactcatactgcagattaacggattagcgagagtgtaagcagtagggacgggtttgggagatgttggtcaaaggatacaaaatttcatttagaaggaataaattcaagagatctgttgtacaacatggtgactataattaatgataacttgttttattcttgagttgctaaaagtaaattttaagtattcctaccacaaaaaagtatgtgaagtaatacatataattagctctatttagccatttcacaatatatatgtgtcaaaacatgtcgtacacaataaatatatacaaatttttgtcaaaattttaaaaatgtatgtgagcaggagttaattcatctaatgcctcagtgaataaagtgctgtgttaaaggtatagtgatcaataacagttgcttccttcagagagcttatagtttattagggcatacacaccaaaaaatacagcgccaatgtgcagatgaccctggagagccctttaagccatacaggggattcagcatctggtagataagtgttaaataggaccctagcagggatacatataggcaagccatgttggaatctggggactcagattggcacgtggaaatacaaagatgaaggattcaggtggaaagctgctgatcaacaggagtgaggaacccaacacctagatcagaacaggattcttgccaaaggaccaaacatcaagaccttcatatttagccagtacattccaagtgacctttacattctgaattagggtcttattgtcatagctgtaggaaatgtggacttggatcttggccagcagagagttagattaaatgtgcagggtgaagcactgttcagagctgagataaagcatacacaaagaggcaagtggttgagatggagcagctcagtggatgagagttagttacagatgagattgtagccatttgcatttttgtggcaacttgatatgattggttgatgctcatcaattcctgaattttgaaaattacttatatctgtatcatggaatgttatagttggaaagacagaggccatctgcatctctaactttgctgtcttctgtggaatgaaaagcatgaaatataagttgtgttatgcttttatatagatgaatacttcatagcaattaaaatattataatctagtgttttattagatgtagagatgccttaagaggttttattttaaacccacaattgctttacttcaaaaattgctctttcttgggtgaataacgtgaatttcatcatacatcctattggcaacaaaaacttttttttttttaaaactaaacctcatttggcctgtgaattgtcccaaatcagccagtgaggaaacattgggagtcctaacccactctgactttttccttactttagggagcaagctgggttggctagagtcctccatccctatctgtgttcgtcaacagcaggtgaccttcacaaatgatgaggacctgaatgcttctggtggctttcacagtggctgatgtggcacatgagaagactacaatgttagtattaaaaaggatgtttagaagtagctctaattgacatggaaggatttctgaatatattaggtgaaaaatgaggttagagttctttgtagagtgtactagcttgtttttacggagtgcttttcttggcatcaggcattgtgctaaggccttcaagttatacagtatcatacatccttacaaccctattttatagttgaggaaattgaggtccagagaagttaaggtcactcacttcataagtggtggaactgatctttgagtgcacccctgtctctggagcccctgttcctagtcctctccacatgaacagcccttcctgggagtctccaagtaccagctttctctgacatagggtcacgcatgcacatgcaagtagaaaagggtgtggaagtcgcatattataaaacaggtaagaaattactgttttataatatgatgcagtgagtatgattaagaaatagaccagcctacttaatgtgcttatctctgttatagggatttctctttttttcctgaatgttctaagttttcaaacattcagcatttataactttttaaaaattatgaaagcaattagaattatttaccataatgtattattactggattttaggaagaatatggtactaaagttgtttagtggttcagactgagagtgcattaatgggaacctgggattttgtttgtttgtttcctatttgagggaacttgaattattgttttgggccttattttgttcatctgttggaaaaaagcatgccatattttaagttacaggctcattataagaataaaaaactcctttgaaagatggattgataaacacatttgtaccatcgatttctggttagtgctgtttaatctttatgattctagtgtcaaattctccccacaactctaatatagagtcaattcatacattcaagttaatggtagatggtagatagtatgcataaaaaatttgaggcatgaagttgtaaatgaaaattaggactaaatttaaatttaaatatacataaattttgtatttaaaactttcagtacagccatgtaccctataatgacattttggtaagtgacagactgcatatataagggtcctgaaagattataattctgtatgtttatggtaccttgtctcagttcagatttgtttagacacataaatacttgtggtatagttggctcctgtgttcagtacagtaacatgctgcacaggtttgtagcctgggagcaataggctatatatcatataacctaggtgtgtaggaggccataacatctaggtttgtgtaagtgatgtctgtgatgttcgcacaatgacagaattgcctaatagtgcatttcttagagcttatccccatcattaagtgatgcatgacctgtatattcaatataatataaatgtaaattggagcattatgtatatatgctgtagtgtagtaggcaacaattgggtagtgcttggatcacagaaatgtgccactttctgagaatgccctagtagatgtacacagcaggggcctcactggccatttttctgccatgtcatctcttggcccttttttatggagctctacaaatcactgcagcgtggaactggttcttgcccatcccgaggtttggatgttcagtttctcctgaagtctacagtatttgttttcaattgtatcccccttttttgcttaaactagacagaattggtgtttttgggcaaacactatttaaaccttttaaaaagggtctgggggtctgggtactgtggctcatgcctataattttggcattttgggaggctgaggtgggcagatctcttgaggccaggagtttgagaccagcctgggcaacatggcaataccctgtctctacacaacgtacaaaaacttagctgagtgtggtggtgtgcacttgtcgtcccagctacttgaggggctgaggtgggagaatcacttgagcctgggaggtcaagtctgcagtgagccatgaccgcaccactgcattccaacctgggcaacagagtgagactctgtctcaaaaaaaaaaaaaaaaaaaaaaaaaaaaggctatcatgggagtgcttaataaacattgctagcaatttcgaatcctattttacataaaagattatagtaatttttaaagtaaggtttttaaggcaagcaaaggaacatgtattgatttctgagtatattgcacatttaattacaacaaatgaaactggtcatcttgtgtttttatttttgttttcatctatctgctttccagactaattggggagcaagaattccttttcctttccctgtttcctttagatgattctgccccttcatcttcgctcctcatttctgtagcttgactttgttctgtagctgtgtgctgttccctgggtgcctgccaggagggcgcttccttctgcctattcctctctccattcattgactatctttaagtggcgttttttccttccctacctgtattaagattttctacttgcagactcttctcccatgttcacaggagctggtttttccttgttgtgcatggaagcacctttggttcatgtttaggatatgagcattgttgacaggcactgttaacaggtgaaaacatctcaaaaggatgcttgattaaaataagtattttgttgttcataagcctctttatttggctttggtaaactaggagcctaaggtaacctttcattccagttttttaagtttttgtggttatattatgcagtttttattatgcagtgcttatttcttatgacaaaatatgagtaggttaaattcataccatatcaaaatgtagtagtgaaagtctctacttttctgatcctcagccccctagttccccctgcttgaggctatcactgtttccagtttcatgagtatttgttcgctgatattttatgcatatacaactatatatgtctttccttgcaaccctttgacattatacagatggtagcatactcttagcttggaggctagtcccagcgcatttttcgcctatattgtgtcttagagatcatttcatattagcacacatgggtataccttgttacaaacatgcacacacagaaaataagctttaaagccgtctgctgtagtgcattggcattataacatagtgtcatgagtcgtagagctggattcaaatcctgaccctgccatttaagagcttgtgaccttgggcaagttgaatcacttgtctgtgtttcaggtgctcatttgtaaagcagagttaatctctctctcacaaggtttttgtaaggattagaggagataatgtatgtaaagtatttagcacagtgtcttgcttaataaatcatagctattattgtactcattaatttatcagatcaaatgaacccctaatgtgtttctccttctcaactgaaatacacagaaggcattacttattacttgtttcgtgaccttttgtcttaccttggttgtccttttcttccaattccatagtttatcttctctcctacttacctcctgaacttatccccaacaaatgttacatatttcttttactttttgagttttcttggcctgttgatgaatatattgacctagcatagcccttgccattgcattaggtaccatcattgttggttttagtactagaaaaactcaacaaagaaggaatattttcttggtgatgctccagagtgaatttaatattgacaatcaaatttattcaagtcactagacaggatgattccttttgtgattgggatttcagctgggatagaactgagatttggatacagatggtacctggcagacgggaataaatgtggggctgaaatgccacagaagcagttagcagtgtgggcctatctgggggtggcctgaggaaggacattcatgaggggggagtaggtggggatgggaaggacaaaaaaccgcattgttaaattaattggcatgacaactctggcagtggggcctcacggagaatgaatgatatgcagggtgtggtgtatgtatgtgtggaaaatagaaaaatgtggtgtgtagaaactggaagaactgtctccctgggttattttaacgttctgcttcagagtacaagcagtttagctgtgggaagcccccacccttttccacaggagagggatggctctcatttgacacaagctgtcatgcttgtaggagtcaggattgttgcacccagaaatgcttgtggagggtcttgtaaggggttgagtgcctgtaagagcatctgggggcttagaccggtggccctcaaggtattaattccttatcagtgtgttcccatctacacccatggctggtgtggcctaaccaagctggcttaccttttagaagtttctttttattatctcctcaagagtacatgctctggcttcttggcctggcaggctttcattacttacatgatacatatatgtactctttgataatcttatgtttttgtcccttgtaagtttctgcaattgtatactgcattgatgaaggagggtctgctctcctctcccagggtgtctagtgatggcctgcatgtctctggtctgtttattgccaactcaagtaccttttttgccattccatcgtgaaagaaatcaaaatatagcattttgaaatacatttgaaatgttctgtttaaggatttcactttagttatactgtttctactttatattacaaatctggtttcctcttccatttgcctatatctaacccattcttagtctttttttttttttttttgcatttgcttttctgaaaatttgagcattgaaagggagggcagcttgatcatggaccagggctttctgagaatgcgaaaaaatgaatttcaccttgccaaatagaattgcctggatgtggtggagggatatgatgaggcagaatcacaattcttctacacttttgaaattgttctccccaatttattccccctttcctcattctcttctgatgtatgggtttaggaagctccggatgactgtttcacacacgcactcccctctcattctctcctgcccgtccttcccaccgcacacatgcgctgaaggaggtgagcattctggagacctgagtctcatttccagatatctttgccatcgtttgcagttacagctttttttttctatttttttccccctatctcttgtaagttctcatattatacatactttgaactgtggagatagccacaagtaaaataaaagtatatgtttttatattctatggagtaagaactcatgttactatagtaacatgctgctctgtagcagtcagaattgtgtatttcagtgtcagagttccctgttaaaaaattagccttaatattgatttcctcctgctcccaccttggttggtatatgaaaaccctaaagatgaagcatttttaactaatttttgttctttacacataatcagaaatcaaactaaatccatctgtgatgttagcttatggtctttctagattttagccaaagatcttgtatattttaagcagttgccctgttttaatattaatcatggccatcccagaataagtcctgcttgacacagggcatttgttcaactagttatctttgttaaaaaagaaaataccataagaccagtcatattttgctgcatctagagtgagaccaaactttataatatagtgataagcttgaccaaaaaaatgtttaacaattttggtatgtttcaggaattggagaaattagtatgttggtactgtaaggaaaaatgtgggttaaaaaaaaaatccagctaggactcagcagtcttaatttaaaccttgtgcttgacaaaaattgaatgttgcctgtatactccagacacaatcgtgaagctcagtttctgtatttttcttctgaaatttaacttctgctaatataacataggatatgtggatgtcttgcaatcctaaaattttaagatatttcagggcttatcaactgaaggctcttgaaatgaaaactactacatgtattcatcatacgtgaaataaaatctttttgaaactaaaaatcctttaaaaaattcacaagcaagatgatactatagaatttcttttgacagattccttagaaacgtcaaaatcaaagtgaaaacaagttggaaaatcctctttgattttgctgggtcacttaatttgagttgatttcttcagagcacataacgtttcttaaagtacagtactaatgacagagtcccaggtggccagccttgtgagctgcgaactttgtcctgttgtactacctctggctctagagactcagcctaggaatgtgaattggtgagaatatgtcagaacctggcttcctattgtaggaactcagtgcacttatttggttgatactgagtcgctataaaaatcattgacatgaatgacaagttgtgtttttttccccaacagttaaagacattttacatacagtatgtgaagttactttccaaagaaacattcttcatgttttcgcaagtttttttttaaacctaatatttaatgcaatgaatgtgggttggtttctcttcttccttcttccttctcctcctcctcctccccctccctctcccctctccctcccatcccctcccccctccttcccctccctcccttccttccttccttctccttccttccttccttccttccttccttccttccttccttccttccttcctccttttctctctctctctctctctttctctctttgtttccattgtaaacatatttgcaggattcagaggtgaaactgtagcggaatgtatacacagaagctctgcttatacctttgttcccccagcctgtttgccctctccctctacaggtcatcatttttattagcttctttctaaagttttttttttttttcacttaggtgccacacagcatcgagtgaactattttaaagtgaacagttgagtagtgttgaatacatccagagtgctgtgtgatcaccacctctagttccgggacagtttcatcccccaccaaaggaagtcccatacgtattaagcagcccctaatgaccatccacccgtgttctgcttctatggatttatctattctgaatattttatatacaggaataagactttgtgtctggctgcttttgcctggtgtgatgtttgaggttcatctgggttgtgttttgtcattacatcatatctttttatgactgaataatattccattgtatgtatgtgccacagtttgtttatccattcatctgttaatggatatctgtgttgtttccaccttttggctattgtgaatagtgttgctgtgaacatgtatgtgtgtttgaacacctgttttctcttctttttggtatatgcctagaagttgcattactgggtcatatggcaatcctgtgtttcacttttcaaggaaccaccaaactctctcccacagtggaaatggaacaatttccaccaacaatgtagaagaattccagttggtcagattgttgcctacacttactttccttttttaaaaaaaattcagtggcattcagggatcttcataatctgagctttgttttcctttgcagtgtaatctcttcctggtttcacatgccactttcagaatactggattatggtaattgcactcttttgctcccttctcttcacctaatgtgttgtccccacctgcccttttcccccacccataagaccttgtctctgtctctgtcgcccaggctggggtgtggtggtgtgatcacagctcactacagcgtctacctcccaggttcaaacagtcctcccacctcagccttccaagtagctgggatcacaggtgtgtgccgccacacctggctcatttttgtttttgtttttgttttgccatgttgccgaggctcgtctcaaactcctggacccaagcaagctgcccatctcggcctcctagagtgctgaaattacaggcgtgaaccaatgcaccagaccaggttttgcccttttgtttgcaggtccctttaactgtgatgctgtctcctagcccccttcccccactcgaccgagggccaggcaaattccaactcatttgctgagtttcagtcttcaccaagtctgtgaacttcaaaagacgttattcattgttacattccctgcatccggcacagtacctgatgtctgatgggaacccaatacatgtttgagtgaatgaatatgttgtataattcttttttctttatcacgattgctgctggtgccgattgaatttccagagcttgctgtaaaagataggaagaaaatatgtggtaacattggccagtgtttgggccataagatgtgtagaggttctaaggaaaaatacacttccaaactcattcacattgctggtcatgttcagttcctgtggctgtaggactgaggctcctgttttcttgctggcagtcagctggggccacacactgcttctagaggtcaacttgaattccttttcgtgtgccccactccatcttcaaaccagcaatggtgtgtcaggtcctttgtatgctttgagtatttctgacttacgtttttagttggagaaactctgggttcatgtacctagatcaggtccaccttaattatttccctgccttcaggttaaatgtgctgtagaatatgacattgtcacagaagtgagatctcatctttagttacaggttccagagtatggggcagaacatttttgaattctgcctagcacagtgtttatagtttattgatctgtagataggttgggtaaaggttcttcttcagccagtaaaatgtcatcttctctgtcttttgattgcagggtttctattacctatgtccatttctttaagccgtttggtctcatattcctctgtgtgttacaagaattgtatcatgttatctatttcatgtagaagtaagcatgagagaaatgagtgtaaatgggctgttggccctcacagtaaaatctggtatctattctagggagatactcatgtttttctcctttttcacattgctgtcgtagggtcagattcatttttcatggtcatttttctggttctcttttagcatttgaaattgagtagattgttttgattgtaagaatgttttttaaaagtaaatttttattaaaatgtatatatggaaaggaagacaaatagtatattgcttgataaattttcacaaagagacatgcacatgtaattaatacccaaatcaaagcattagaatatttactagtaccctagaagccttacctactcaatagctcccttaaaggcagttttttgcttgcctgttaatttgatgaactttcagcctttgaaaagtcgttacaaaaagccgatgtgtaaaatgtttggaggataggataagaataggaggtggctcttggaagtttgtttgctcctgagtatgggacctagtgatcaaagatgaagtggaactagatactttatcttccctgtaataggaaatacactcccattgtataactgtaatttttactcataaaaatgggttttgcactcaaagcaaaagtaggctcttacttttactgttaaaatagaaactggaaaactgttctttagaaaagtcatcctaatgggttcaatttgaggtagttgctggtttttatatttttatttttttgaccagtgctttaagtttttctcctgtaattttattaaacctatgcccaggaaaaagtaaacggcaagatttcagaatctgaaagtttcttacgtttgaaagaaagtcctcccatgcttcatttttcctaacagaaggtaaactttccatgctgaacttgtctctatttttaacagaggacaagctttaggaaactgtattcaagccacatatagtgtggtagattctggtggtggagcagctattagttatgtttctctggaactgcatttatcatcactgttaccaaaagcatcctaggttccttgggaagaagatcttaaagttctctaccaaaccactttttttttttggtgatgcttcagtctcacaggtgatgcttaaaacacagattctgatgtggagatttgagatcttacaaccatagaccatatgttaaacattgactacacaaggattcgtgatctgagcattaatagcctgtttttttcctaattgcatgttttatagtaatcctaacctttaatatataagatcctaacctttatatttaacgtcttaacctattgctctgtatttctttaatgccatggattattgcttacagttataaatgaaataagtaattttactttatattttcattgatattcaacgaataccaatttaaggagagaaacatagatatacttttaaagaatttaagcgtggcacttaagattctttttattataataagcatgtgaagaagctctttttctgtaatcctagttcccaggggccaaaatgatgattaattacagacaataggtttataaaagtaaccgtttccatcatagaagtgtcataaaagattaaagggtgtatcaacaaaatgaaccagcttcctgtgtaaaattattaatattgctaaataatgtagccttatatctgttacaaaagtaccagaaaaattgctggataatgtgttacaaattttttacaaattacatagataatcctcagttctgttgaatttctctgacattctgctcaactagtttttcctgtgcagaaaaatcttaacaggttgatgttacaggaaaagtggcatgcttttagaaaccatgactaggctgcctgaatcaaacatcctcccctttgagaggcctaggaaagaaccatctcgcttggttgtatccagggtacactctcatagggataaagagccaaccaaataaaagggcagacatatacttagctgtacctatctatcctaatgtgtgtatatatagtgaagctattgtacaatatttcttaatgtaacttaataaggtagttagttttttagcctcctaatggcttagtgtttataaaaatgatactcgttcactgcaaattgtagagtatataaaagtgtagagaaagtagaaatcaacagaaatccttttccctcgagataaccgttgtgaacattttggtgaacatgtttctagaaatctctatggttatatacatatgtaaaagtgtacatatctaatgggatcaaattatatgctgttttgtattctctcagtccacaacttgccagttttcaaatctgtaaatgtagatatatattattttcaatggatgtatgctcttccactgtgagtcatagtttagtttactctgatatcactagacattgaagttgttttagttcttcattataaactatgctatgatgaatacagttgtctggtaattctgttagtttagggtaaatactttgaagtaggattgctggctcatacagtatgtcttgtttcccgccacagagctgccctttggaaaggtagtgttagtttacacatccactgagtcctcattgctacatcttctcaccaacactgctttctaaattaattatttcaattcatttattttttatttaattttttatcatggaaaatgtaaatacatgcaatggtagagtatgcatctatcactcagtttaagtaatttcaactcatggctaattttggttcatctacatcccacctgttttccttcttttcattttgtgaagcaagaggcttctcaggctgtcatttaacctgtgatacctcacttttatttacatctgtttattactgaaatgagtattttttaaatatacttactgggtacaaagtggttataaactttaatagtgagttaattgattttcttcctgtgggtttacaccaattgcaaaagtgtaatttagctcttaggttgaataatcttaagctgatttaatcttaagtcagatgtaaagataatgttcagttccagaaaggtaaccagactctgagctggttaggtagcagctgcagcgtttggtcctgggtgtgacatcttaagaagaatattgacaaatgagcatttccagaagagagtgaccagcatggtgatattagagaatagtgtcacacagggaatggttgaaggaaccaggtggggatcttcagtttagagaagacagaaatttgagggaagaggctgatgaatggagacagctatctgcagatttgtcatgtggaaggtttcagggataacaaggaagaagctgctaattaagtagcaataaattttatctcctctctggctgcttagcttttattgattttatttatatacagctgctggaagcaagcgactggttttgtgattaaaatgatgcttttgggtttctaggaaaccctgagatgatctttgtcaggttttacttcacatacccatctctccaaacagggatttagcgttgagatttaaagcggttttgccatataagaaaatatttttcagtagagaaaaataatattccaactgaaagctgtccagtataggcccagaatcccatatctgtagttccaaaataaaaaaaaaatcctgacagcagaatgtttcctaactcatttagaagcaaaacttgacctgaatgactgtgtctttatttatcctacttgatgtgaatattcatacatttctttgcagaaatagtaatgtgtttgattacggtatgcttttccataccccaggaatattatgtaatgctgtaattacccatcgaaaactcatgtctgaattcttaacacttctggcacagagggtgtgtatacctatagttgtcgttctgtcgtatgttgaattatatgcggtgtattttgataccctatcactatgcatgtgtaaaaagggaatgatagtgcttttcctgtttgtccctctggaggctgtgaaaattagattactatgtggagcatattcagaatagaactgcctaaaaataacgtgttactggtatggtattcttattctgtgtgtgtttaactttctgcccgaagataattgggaagaataatgtggaaatctgtagttgaaatattataactgttgaacaaagagatgtcttccagaggcaaaatgacaaatgatatttaaaaaatattttcactttatccaatctgattagtatattgtggtgttattttgaattatttgaaatgaagtaatatatcataaaacagaattaggcttattttaaggtctacacttatgagctcttacaatttgcttttagatatatatattgaagttacttgtaaatgatgatgatgatttcattttagatcatgctaacattctagttcagatgatctgggttgcttgtattagtgtggcaagacccaaacttcacacagaaaggaaaggcagtatgatttctaaaatatttacttatatatataaaaaaacttggttaaaatcaaacagcagaaaaatgtattacataaaagtctccttcccctaatccttgtactcaaagataactggtatgattttttttgtgtatttttttcataaaatctttttatgttagtatatatttcaaaaattcatacaaataggatgatgcgctctccatttcatccctcttttacttatgtgccttagaaatctttccatgaccacacacatagatctattctccttttagtgactgaagtattccacatggactatacagttcagttagttcaggtcatgggctgttaggttgtttggttgtcttttttgtttgttttaaagtaagtagaagtgatcatgcagtgaacaactttgtgcagtttgacatatttttctaagaaaatcaaaaggtagattcctagcatggaaatgtaaggaatcatttaaatatactgataatgctggattacccaaaccaaaggtctcatcaatgtagtcttttacgatgttcaccgatgccgtttatcccctctcttgctactgctagacattatttaagtaggtacgtctttaaatgcatttttcatttaaattaatttatattttgttaatgacaaattaaatttgaagaaaaggttatatatgtatgaggcatatcattttacattttgcagataatggttggtactcatttaagctcccaaaactcttggttctaaaccacgtccatgaggcactctttgatgactctggggaaaagcagattctttcctctcttctcattttgatctccttgggaggaaacaagctcctttttcacatacttttttgaaaacagctttattcaagatacaattcacctaccatataattcatctattgaaagtgtacaattcaatagtttttaggatatttagagttcagagttgtgcaactctcagtagtcaatttcagagtattttcttctccctaaaagaagcctcacccttcttagctataatcacgccacatcttcacaccctaccctaggggaaccattaatctactttgcgtctctatagatttgccttttctggacatttcatataagtagaatcatccgggatgtcatttttgactggctgctttaacttggtgtgctgttttccacactcatccattttgtggtatgtattactacagttggttctctgcattggtgcattctacatctggtgttcaaccacagattaagaatacttaaaaaactgcatctgtactgaacatatgcacacttatttttgtcattattccctaaccaatgcagtataacaactacttatatagcatttatactttattaggtattataagtaatctagcgatgacttaatatatgagagggtgtgcatagcttatatgcaaatactatgctgttttatatcagctacttgagcattcatggattttggtatgcataggaggtcctggaaccaatccgctatggataccaagtagatgtctatacttcattcctttttatggctaaatagtatttcattgtatgtatatgtcaccttttttttcccatttaccagttgattaacagatatttgggttattttcactttctggtgtctgtgaataatgctggcacatactgatttcatgtggacatatgttttcatttctcttgggtatgtacctacaggtggaattgctgggtcatatagtaactgtttaagcatttgatgaactgctagtttcctaagtggctgcattagtttacatttccaataccagtgtgtgagggttccaatttctaacacttattttccttttttaaaataatcatctcctgtggtttaaatgtgttccctaaattttatgtgttggaaacttcaccctcaaattcatatgttgattggaggtgggcctgtgggaggtaattaggattagataaaggtcatcagggtgaggcctccatgatgagactgttggctttgtaagaagagaaagagatttgcactgacatgcatgtgtttgcattgttttgtcatgtgatgcgtcttgccatgtcatgatacagcaggaaggccctcaccagatgccagtgccatggtcttggacttcatagcctccagaaccatgagctatgtcaacttttctttatgaattacccagtctagggctaggcacggtgactcatgcctgcaatctcaacactttgggaggccaaggcaagaagactgcttgagaacaggaattcgagacaatgtgggcaacataacaaaaccatttcgcttaaaaaaaaaaaaaaaaaaaaaccaggtgtggtggtgtacctgtagtcctatctacttggaaggctgagttgggaggattgcttgagtccaggaggctgcagtaaactttgatcctgtcattgcactccagcctggatgacagagtaagaccctgtctcttaaaaaacataaaaatagggctggttgcagtggctcacgtctgtaatcctgcactttgggaggccaaggcaggtggatcacgaggtcaggagtttgagactagtctggccaacatggtgaaaccccgtctctactaaaaatacaaaaattagctgggtgtggtggtgtgcgcctgtaatcctagctacttgggaggctgaggcaggagaatcacttgaatctgggaggcagagattgcagtgagccgagattgcaccactgcactccagtctggcaacaaagcgagactctgtctgaaaaaaagaaaacaaaaaacaaaacacccagtctatggtgttctgttacagcaacagaatatagacaagtgcatgatcctaataagtgtgaagtggtattttgtggtttttacttgtacttcctcaatggctaataatgttgagcatcttttcatgtgcgtattgtccatttgcatatcttctttggggaaatacatatcagatcctttgcccgttttttacattagttgtcttactgagttgtaataattctttttatattagatataagtgctttatcaggtatgattttcaatctgtgggtcctcttttcactttcttgatggcattcattgaagtgcaaaagcgtttaattctgatgtccactttatcttttgttgtgcttttggtgtcatatctgaacacaagtctttaaaggatgaatttgcttggtgaaacacctttcctttggataccaggttcataagattggacacagtcaacatttttttttttgatctcaatcacttattccttgaagataatctcagatgcagcttattttaaggcagtcccaattagttgactttcagatgtgttatttggaaatacttttaaaggtattttgataagaaaatttaagttttacaataaaatgtaaccttgcaatgtagctttgcattttatggtaaacattagttactgcttactttacaggtactaaaaatcaactacttcaatttcagaatgtaactttctcatgccttattttatttcgaccagtattaagcctctttatgcttagaagatggtgttgaatctgtttcaggttaaaaaatactttattcaaactattattttcttaaaagttaatatgtctaaagtttttgaaagacactgatcactgagatgtttggagatttaaactggtttatttttggttatccatggaaaactttaaaaaatttctttattgaattatagttttaagtctccttattttattctcgatgattaatgtacagggcgtggcttacttataagtgtgactaaagttgtgcaaattaatcctagcagggctccatcctttaatgtcagtgccgtcagttgttctccccttattcctattattctggcattatatcttatctgtatgtaaattcttattctgtgggtgaaaagggatatggttcaacaggatccaagaacttaaaaattgccctttttcacatttctcataagtagtaagtctcctaaagcgaagtcagagtcattataaaggcatgataatggagtctgttatctatttggaaaaacaacttttattgccatttataataaatgtaaatggcctgccatttattttagaattactctgtttctaggccctagaaaggctctgcattttataattaaagttagtagaggctagaagaacttataggaatgtcataatgtgctgtaggggacagtgatacttttaaaggttctgacattcagccagtaaggtgcttctagttccagataacttcttttccccccaggaatagatacagaaaatatttttggtaaatctgccaagttttttatgtgattctcattatgttaaattttattatcagtgcctaaataatgctaacattttaagttaaacagttattcagcttaccactttgacattaccactgattagaattgaaggctaagttgagcctggggaacgagcctctttgtccagaaaagggctcttagatttttccctgtcagtgtattgtaaccttttataagggcagcgccaagaaaggagaagctgctacttggggcattgtgtttgactttggtattctcacaggtatgctgtctaggaaagagttcaggtctcctgcttaagaaattgggaactaggctgcttcctgtggttctgttgctttgtcgggggagggagggtacctgatttctactgaaggccaaaatgcagagtcaatatggccggttattggcaaaaattatgatatttagaaacttttggaatgtctgcaatgttttctagacattctagggaggtcactggtgtttggaaagtacatacaaatggtgtatgaaaggagtgtgccattttctgcagaggtgttcgttacatttcataaccttatgttgccatttaatgaggtcaaagaggtttcttgactgtgactatggaatgcttatcttttgttctgtcttgatctcctcctgtctgtgtctctcattatctctgactacttgtatgttggcagtggctttatttcctttcacactcagcctggattccaggctcatctctaactcctacatcagaaccctgaactggcttgtctgttttgtaatctgccctaccatgcatacccctaacctagcacaaacgccctacccttcccttctcttgtacccatgtggctcagcacttctggataaattagaacaactttgacgatggtattggtcagggttcgattatcgaggacagactctaattcttcctactttaagcagaaagcagtttattacagggaattaaatttcttggtgaattgttgagggtacttagaaacgctcctagcaggttgtgctagagtataattcccaaggctgccctgtggaactggactgccagggtggccagcatcctagcccaggcatggggctgctgatttggctgttgctgctccactgctggccccagaaccacaccaccttggccgctgtccacaagagtaaagtggctacatcacacttagtttctctccccacttagttcagtttcattcttaacccagttggaccataccatttgtgttttgcatggttcatgtttatcatgatctgaaggaacctaaatctagagcagaaccccaatgtggtttttcagctttccagactctgcagagctagaaggtgggagtagattgaagtgagtcaatctgcagtattttccacatttatggtttccgagtatagctggctcttcaagattgttttgtagtcctttcacctttccttgataggttgacttgtttgctgatgaaagcagcagttctcattctacgctggcctctttcattctcattagatggtggagcctacgcttgagagaagaagctgtcgggtacgaactccacttaattgtcctcctgttcttccctgccgtccctttcaaatgaccacaggtagctgtcatagccccgtagagagtgtgagaaagcacaggcaggagtcagcaaggttgctgggaggactgaggctctcggaggtggatcctggaggtgagagggccaggtgtgaggacaggagcacgttccagaggccccacgacagcctcgcccagcacatggcaccattcttcacttacaatccagggcactctactttcctgtcttgctggtggcagctcattctgttcccttcgttgaatcttcccttcctatcctcaggttcagtccttattctgttcttgacttctctttgtggacaatctccttagtttatctctagcttcaacctttcccagaagtctagaggtatatttccaatggtcggtcatcttagatagctcataggcttctcacatctaatatgtttgaaaccactcttgatttttcttttttttcaaatctctctcacttagtgtctcccattttaataagtggctttatcatttacccagtaactcaggccccaaatcttggagttatccttcattttttttcttctctaatttatcaccctgaatcccattagtaaattctgttttctctgcttttaaaacataccctgaaaccagtcacttataatcagccttattgctgccattccaggccaccatcatcactaataagccttataaatggtggccctaacttttaacttctgtatccagttgccagagtgacataaacctaaatcatgtctttccactgctcacttagattataaatactattgcacttagaatacaatttaaaatccttgctgtggcctacaaggttctgtgtggatggtcccagttatctttctttatttaccccctaagcattatccacctggcttaccaagttacttccaagctgtctcctgattgttctctatttaaaacaactgctttattaacttactgggataagatacataatggtacttatcttttttttttttttctgttccccagtagactataagcttcataggtaggaatgttattttgcttcttgtgttatcttttcttcacctggtacatagtaggtgctcaaatatttgccaaatggaagatggggacagggaaattattctacaggtcttgtcttaattggaagattgaaggataagagggtctttgtggagaaagtagtctgtaagaaatagtagtaaaatatgggactgatcactactgccaggaagaggaaagtaagcactagaactttcaaattcacagaagcaaaaatgaaatgaatagtaatccaaccagaccagtgggagtcaggaaaggaaaagtagaaactgcaagatagaaaagaaagatgaagaaatgggaatgggccagagatttactgtcttaccaaggtggagcagccccatttctctctaccctcttaggactcaaaatccctggacttcatataacaaagaagcataggaagatgctgaaaggtggagagaagactgtggccactctagagtcctggggacttgagaaatgacaagggtgtcagttcccctccttactatctcccacatgtctagtacagggcactgcagaagcctccatccctgaaccaccagtaggcacagacagcaaaactctgagaagagcctgttccccatagccagaggacaggggaagggagggtggtctaacaaaacagagcttttgtcagtactcactctgctccagctaaaccaaggaaactgccctcctcccttcccaggcttcgagagcaggcagcatgcttcggttccccacccagaggctgaaggcatgcctgagcagagagttaatctttcatatcctgcctggcagaagcaggtggtacttcaattcccctgtcaggtggtgctgacagcgcctagtggggagctgatcttccaccctctgcctggtaggagcaggtgatgctctgacttctctgccagggtagtgtcagcaaggcccaggttagggccatatccagcccccaccagccacaatgaggtggtgctagcagggggctaattaccattacacttgacctcttccatccccatcatcccctggtggggaggtgtgagcctccacacccactggtggcaaatgaggtatggaggagcggagcatgctggcactccccacctccccgcccctcctttggtataaatagggcccccgggggtcctgaacttctgctcctggatgcagcaacaaactggcatggcttagcccttggctttcccttccctgtggtagcttggcccagagggtagctgatcttacacagaggcaacagaaatggtgagttggagccacactttggctgggaaagtgtcagtgagctgaactctcaccccatctgtctgcaacaaggcaatgtgagtcatcaccccacttttgtcagggtgatggtggggagtggggggctagtgggtaactgaatgtgcatacccactcatccctggtattaatgcctttttagcagggaagctgcccactaaaagattaaatttgatctggggtctcttaatatcaaaaacatataggatacaattcataccaatttatacaattctacagatcactcataccaagatccaggaatatcacctatgaatgagaaaggaccatcagcaggtgctaactgatttatctgacaaggatttgaaagctgctatgataaaatgtttcaacaagctattacaaattcttttgaaacaaaacattagaaattctcagccaagaaataaaaataatttattaaaaaccaaaaagaaatgatagaactgaaaaataatgatagtttaaaaatactgaatgggctcaatagagtggcaatggcaggctgagaatcagtgaacttgaagacagaaaattagaatctgcccaatgtgaaaaaaatagactggaaaaaaaaagtctcatagacctctggagtgatgataaaagagataacacttgtgttgttgcagtttcagaaggaaagaatagagtgggaccaaaaaaaaaaaatctgaagaaataatctgactataatttctcaaatttggtgaaagacagaaagctgtagatctaagaagctgagtgagccccagacaggatcaacccaaaggaatctgtgccaagacacatcctgattaaacttgtgcaaggcagatacaggaaagctactgaaagtagctggagtttaacaatgtgtaatttgtaggggaaaaccagtccaaatgagaggagccttctcatctggaatgatggtggccagaagaaaagcagcacaacatttttcaagtactgaaagaaacaaccattaaccaccaattctatatgcaacaaaaatgtctttcaggaatgaggggaaaaggaaaactttcttgcatgaaggaaaacaagttgtggttggttaccaagcatacccttaaaaactaggtaaaagttctttaaatgaatggaaacgaaaacataaggctctgaatttcagaaaggactggaatgggcaaatataggggcacatgtaatagactttttatgagttatatttggttgaagcaaaattttaatgtaatatgatgtagtaaatatatgccgcggaaatatttaagacatgcttaaaaagtggggaagggccttttggctggaaccaaccatcttctgttaatttgccaaaatgatgaacgacaaagagaaaagggagaggcacctggtatgttctctaggccttttagaaaacatggacttgttcttttggccacatacctgcaaatctataagaaagatgatattggagacatcaagggaatgggtactgttcagaaaggaagccccacaagtgttaccatggcaaaactgcaagagtctacgatgttactcagcatgctgttggcattgtaaacaaacaaggtcagggcacgactcttgccaagagaactaatgtgcgtgttgagcacattaagcactcttaagagccaagatagcttcctgaaacatgtgaaggaaaatgatcagaaaaagaaggaagccaaagagaaatgtaccagggttcagctgaagagccagcctgttcccagagaagcacactttgtgagaagcagtggagaggaacctgagctgctggggtgtctctcctatgaatccatggcatgataggtgttaaaaacaaacaaacaaacaaacaaaaaaaaacaccaaaacaagaaaatactctggactgtgtttaaagaaaaaaaaaagtggggagagtaaaggcaacttacatggaagcatggaagcctgtttttcctattttgcttgtgctggtaaaaatgttgataccggtagagtgtgataagttacatatgcttactgtagtccttagagcagccattatgaaaactggtatactcgagcactatgaataaatgaaggtggaattattaaaaaattgacataatccacaggaagaaaggagaaacagaagaaacaaaataacagaaataattaaatggcaggcttaggcttgtcatactaataattggcttaaatatagatgatctgaatacaccaattaaaggatagagattggcacagtggttaagaaaacatccaaaactgtgttgttcaagaaattctcttaaaccaatgacacaggtaggttgaaagtaaaggatggaaaaagatatgccatacaaacatgaatttaaacaagagtggccatattaacattcaaaaataatttcagaataaattaataaagacagaggcataaggatcaaataatgaacacattaggaagacatgatgatcctaaatatgtacacaccaaacagaacctcaagatacatgaagcaaaaactgagctgaaaggagaaataaatttaacaaatactatatacatataaataaatgtaataaataactgaagtcttaaacaccatattcttagcaattagtaaaactatacaccaaatcagcaagaatataggacttacacaattgaccaacagaatctgacatttagaacaatttacccgaaacaatagaataccctactttttaagtgcccatgggacatcatagacattattctgggctataaaataaaaaacgtaaaaggattgaaatcctacagaatttgttctgtggcaataatggaatcaaactaaaaatagtaaaggcaacaggaaaatttctaaataacacatttataaataattcatacgtcagtctcaaaggaaaatattaaacataaaaatgaaaatatgttattaaatatgtgggatgtagcttaaagcagtcccaagagggaaatttatagcactgttataaattaagttgaaaagtggaaaggtctcaagtcaatttaagctcctacctcaagaaactagaaaagagcaaaacaagcctaagcaagcagaacgaagagcagaagtcagtgaaattgaaaagaggaaaaagaaaaatcataaaaatcataaaaagttatttctttgaaaagatcaatgaaatttagcaagactgacacagataaaaaggaataagacccaaatcagtgaacaggaatgaaatagaggatatcactacagaggctgcagccattgaaaggataattaggaaatcccacagataactttgtgctcataaatttgacaatgtagaggaaatatctttagttttaattagctttttattttagtttttctcaaaaactaaaacttaataaaactcaaccaagacaaaatagacaatcagaatgtaggcatacctcagagatgtggcggatttggtttcagactactgcaataaaccaaatatggcaataaaaggagtcacagaaagtggtttcccagtgtatatatataaaagttacatttactctatgaagtgcaataacattttgtctaaaaatacacacagtaattgttgctagaaaatgctgacacaaagtgagcacatgctgttggaaaaatggtgctgatagacttgctgaaagcagcgttgtcactaatcttcaatttgtaaaaaaacaagtaaaattaaaaaaattggccaggtatggtggctcacgcctgtaatcccagcactttgggaggccaaggtgggtggctcacgagctcaggagatcgagaccatcctggctaacacggtgaaaccccgtctctactaaaaataccaaaaaaatagcggggcatggtggcaggcgcctgtagtcccagctactcaggaggctgaggcaggagaatggcatgaacctgggaggtggagcttgcagtgagctgagattggaccactgcactccctggagcctgggaaacagagcaagaccccgtctcaaaaaaaaaaaaaaaatcatctatgaagcacaataaagtgcaataaaacaaggtatactgtaatgttaaagccattaaagaaattgaattcttaattgaaatgctcccttaaaaaagaaaaaatctctgggtccagatggtttcactggacaatttaccaacatttaaagaagaattaacaccacttttattcagtctcttctagaaaacaggagagaagacctagaaaacaggagagaagacctacaaagtcattttgtgagtctagtattaccctgacagcaaaatcagagacagcaaaaaagaaactccacagttcagtatcgctcatgaacttaaaggcaatgatcctcaagaaaatattagcaaatcaaatagagtaattaataaaaaatatttaacatgaccaaatgagatttatgccagccatgcaagactggttcaacgttcgaaaatctatgccacccaccatatcaacagaccaaagaaaaatcagcatctatcagttgacctataaaaagcatctgacaaaatccaacattcattcatgattaaaaattcagaaaactagcaataaagaactttctcaactaaagagcatctaacaaaagccttctccagctaagaccatacttcatgatgaaagatggaatgtctttcctctcaggttgggaacaaggccaggatgttcagtcttacctttgctgtccaaaacagtagtactaaaagatatccagaccaaaaaggaggagcaaaacagtcccagtttacggattacatcattgtttatcctaagaaatctagaaaaaaaacttcttgaactgaggagttcaacatagttgctgcatacaggatcaacacaaaaaccatgtttctataccctaacaaaaaatatgcagaaactgaaattaaaaacacaatgccatttatgttctaaaaattgtgaaaaagatacaaacttcaacatgtgtaggatatttgtgctgaaaattacaaaactgatgaaacaaatcagaggacccaaatgttgccacaaaccatattgacatactggaatattcaacacggtaaatgtgtcagttctccctgaattatcgtagcttttatgcagttcctatataaaatcccagcaaagatttttggtagatacataaaaaggttattgaaaaacctgtatggaaaggcataggccccagaataactaaaacgatctagtaaaagaataaagcagttggaatcactctactgatattaaagctttcccttatagtgatagtaatcaagatacacagatcaatgcggtggaacagagaactaaaaaaatacataaatatgccaaattaatttttgacaaaggtgaaaaagcaattcactgatagattattcttctcaacaaatggtgttggagcagaaattggacatccatagacgaaatgatcaaccttgatctaaattttatattttatacaaaattaactcaaaatagattatggacataaatgtaaaattgtaaaactcttaggcaaaaaaggagaaagttagccaggtgcggtggctcatgcctgtaatcccagaactttgggaggccgaagtgggtggatcacctgaggtcgggagtttgagatcagcctgaccgacatggagaaacaccgtctctactaaaaatacaaaatcagccaggtgtggtggcacatgcctgtaatcccagttactcaggaggctgaggcaggagactcgcttgaacccaggaggtggaggttgcggtgagccgagatcgcatcgttgcactccagcctaggcaacaagagcgaaactccatctcaaaaaaaagaaaaaaaaaaggaagtcttcagaatccagaactaagcaataagttcttagtctttacaccaaaatcacaatccataaaagaaaaacttggtaagttagaaccagttaaagactttttctccatgaaagagcatattaagaggatggaaagacaaggtacatactagtagaaaatattttcatctgtctgccaagagactaatacctagaatatgtaaagaactttcaaaattcaataggaaaaaacaatccagttggaaaatggacaaaagacatcaacagacttttcaccaaagaggatatttaagtggcaaataatcacagaaaaagacatacattcagtattactagccattagggaaatggaaattaaagccatagggagaaaacttctgctaaatggctgaaaaaaaaaaaaaagcaccaaatgttggtgaagatgcagagaaacattgctcatacattgctagtgggaatgtaaaatggtacagccactctagaaaacagtttggcggtttcttataaaactaaacgtagaactatgatacaacttggcaagtgtactcttggatagttatctcagagaaatgaacacataatcatgcaaaaacctgtacaccaatgcttagagaagctttatttataataaatacccctacacaggaaacagcccagatgtccttcagtgaacgcattattgaaccacagtacttctgtatcatgattacttctcacaataaaaagggccaaagtattgatgcacctactgtgaatctccacatcgagtgataaaaagcctattctaaaaggttatatgttgtataattccattgatgtaatatttatgaaatgacaaaattctagaactggattagtggcttccagtggctaaagagcagaagagagtaggacggacatggatgtggctaatgaaagagtgacatgtgggatccttgtggtggtggaaatactctatcttggctgtatcgatgtcaataatctgtatgtggtattgcactagctgttcaaagtgtcattgttgtgggaaacttggtcaagggtgaatgggatctctgtagtatttcttacaactgcttgtgaatctgtaattatctcttaataaaaagttaaatatgaatggactgacttctattagaagacaagattggaaagtgccttaaaatacaggtgataacaagtaactcttcaattgttaaaggggaagatgaaagtgaagagatgggcaaaaagataccatacaaacaaaaaacagaatggcagtgttgatatcagatcagttgagactaacagttgaaagcagtaaacatattacggacatattattgataaaagacatttatgaagaggataaactgtgaaggtgtacagacactaaaccatagttgctaaacacatacaaccaaaaaaaaaaaaaaaaaactagaaatgcatgtatattttcactaagtttagttagatcaaacaaagcaataaaaggaatattttgtaccaaagcctatggacacagtgaaaactgtgtgcaggggaaaaaatctacagaattaaatgtcttcaggattagagaatacaaagtaaaaagtgaacaatgaaactccctacatgttcaattttaaaaaatgttttaaaaatggtggtaaaatatatcctaatttttcatctgaatcattaagtatacagttcagtagcatcaaatacgttcacattgtcgtgcatctagtctccacagctacttttatcttggaaagctgaagctctgtacctagctcaggatccaattttttttctcgttagttgtataagaaaattccgacttacttaagtagtggcagttattagcttttgagaacagtttctcttgcagtttcaagatgtgctttgcttatgttgatatggaagcttaaaagaagaattgtagacagtttatttccaggctgaataaaaatgtgacagttgctcttgttatcataaatagaagataccccaaaatttgcaacaaatgttaaaactgcattaccattctcagaataggtggatatcgtgttcttcttcgttgttgctggactggacgtaatggcatgctgatagcacgtttcaatcagatgggcctgagccctgtctagtgtataatttaccttttcatatatactgcaggagtgtccctggtagtaagttctgagagaatgaacgtaaaagttcagcagtcctaaattcagaaaatgatgagtggtgagcctttgtagttaatgacatgattactgccagtcttactgttgtacagtaataacaagagatgcttcatttccaggtccacacaagcacaaattgacctaccacacagggtagtgctttggggacaacttatgtaaaaatctgaatagtacccatctgattatgactgttgtgctttattacagattttaaaacatattgcaagaagttaagcgtttatagaagtctttgaagtcttgttgtagaacttcgggtctccacggaatgtggtttgatcactgctgcattgaagtacacagagggcatgttattaggaactgcattttggatttggaggattttattttcagataacttacggattttatagtgaaaatgcttatgctgatacctatttcctggtttctctgggacctgacttcttccagataaataatatcttcaaaagaatacattgaaaaaagatattgggacatgacatatgttaggaaacaaaaagagactgaactaaccttttaatataaacgtagtatgtcagcaaaccaaagtagctgtcattaagagatgagaatttcctgaaaaaaattacgtaaaatcctactcagtgatattaacacattaaatatatttaacttagacattcttacaataagcatgatttgcaatgccattttatttaaatggcagagaaaccccaccattcaataacatgagttatctttttttccaggaaattatttctgatttgaagatgggagtatagtaacatatcagggcttgtaacatgttttcagaaacccaaattccaggatggtggcacggctgaaaagactcctcagcgttatctgttttcccaggcgatgccttgccgtctctttcctgtttcagtgcttctctagagtattgcctcctcagtagtaaataatgttgttccatgaaatttgagatttttcatattgaatagcttctcgcagtaatgtttgatcctttatgatgcaggtcaccccatctagatgacacagcttgggctgccgtgacattggtagtcaggcgttcagtctgttggaattgcagtgtcatcacccactgcagttattcggttcttgttttctgtcttttaagcataataattaaaacagttcttttagaataaccccattgttagatgtttctggcacttgtactcctggataaaatgtttttgggtctaatttttaagatttagagtctcagtttttccacattgcaacttgtgatactgcatcctcttctgcttaaaatctttcagggaggttcctactgtcttaagaataaatttcagactcctgtgcatgcacaaatgctgctcataataaagctgattgtgccctgcatgtgggcaccagcgagaagaggagtcctgccagcttgtctgcagctctggggctggtttcggtgggtggggacctttccccttcactgagaggtgtcacctgggctagtggagctcctgtgagcctccgtgcaaggctgttcatctagcttcactttcttcctaggcttgtctctccttcctgccagcactacaacgtacgtatggtcctgatcgatgaagctacttcagattccacaagtgtgctgtgctttctggtgcccttgtggtaataacaatagagttaacatttatttatttttaatttttttaatagtcaaggtctcactctgtcacccaggctggagctcagtgatgtgatcatgactcaactgcagtctccaactcgtgctcaggcagtcctcctaccttagccttctgcacccccacacctggctaatttagtttctttttttttttttggtgtgtgtgtgtatgtgtgtttgtgtgtgtgtgtatatatgtatacatatatatatacacgtatatatatgtgtgtgtgtatatatgtatatatgtatacatatatatgtatgtgtgtgtgtgtgtgtatatatatatatatatatattttttttttttttttttttttttggtatagcagtgttttgctatgttgcccaggctggtctcgaactcctgggctcaagtgatcctcctgattctgcctcccaaagtgctagaattataggcatgagctactgcacccagccctgagagaattatttattctcctccttctctgctaaactaattggagagagtttcacttcatacaccaaagtctgcagttaaattcttgctgttccctgaaagactttgcatcttcgtgcttctgttggttgcccatgccattccctctgcttgctttcactgcctcttgcatccagacgttagccggttaagtggagttgtacttgatgccacttcttccaagaactcttctccaggtgcacaaaccagatttttttttatattcttttagcaattttgtagtactctgacaacacttggcacatatcttcttatactcttttgtatatggagcagtatttttataggtgaaagagtctaattttgcattattagtgtatatatgatatgttggataccagttggagatctggtgatgtcataaagctgttggtcttactatgcctttcccagaagtacctgatgaagttggaacaaaataacttttcacctattctctgattactacagtcaaggctccagaaccctagccattgggctcaaatgtgccgttgaaggtgattttctgttcctagatattttcaacctccctgtttcatttctgaccaatttttagggccagaggctaatccactagaacaatatttccctgtggcatggtttttaattttgttctgaatttagtttatattcctaagtggctttacaagttttttctccccatgccctcagaggaagttatgttcttctgaaccttctgggtaccattttagtaaattaagaattcagttcactgaatgctacccctgtggcctgaaagagttaatacaagtttcttaagtactttattaattctcagggaataatttatgcactagagcgtggcttagtatcgagccagttacaaacacattaaatatgtttttttttttttccttttgtgtagtaagtctctgaaaataagtggaggttcactttaagtgtaagtattttgcttcctaagtacttaaatatgtataattccacaatgagagaaggagtattataacagaggatgaggtggattcaggtcctagctcagccctgcacttctgtgaggccttggtgtgtttacctccctaaatgtctctcacctctaaagtggggacgatgtttacatcacagacagcaaagctcaatgatgatgcacttaggttttaatgcatagcccaggcttactgcttgggtttgattcttggcttcactacttgataactgtgtgatccgaggcaattttattaccctctctgactcagctttttccactgtaagctggaataatgctagtacctgactcacagttgttacgaaggtaagtgtgcagtaaatgtgagccattcatatacatcatggactactatgcagccataaaaaggaacaaaatcatgtcatttgtagcaaggtgggtgcagctggaggttgttagtgaattaacacaggagcagaaaaccgaaaacaacatgttctcgtaagggagaactaaacatcgagtgcatatggacataaagatgggaacagtagacacttgagactactagagcgggagggaggaagacgcagggcggtgaaaacctacctgttgggtactatgcccactacctgggctatgggctcgtctgcaccccaaacctcagcatcatttagtatccccatgtaacctgtgtatgtacccccaaatctgaaataaaagttgaaattgtttttcaaaaagtgagctgttattttttttaaatactcatttggaggactttctgagctgatcaagtgaaataaaataaaaagtgccaagtactatgcctggaacatggcagcaaacagtgaatagaggatgacttttgcttttattaactacttaaggtttatctatagcaagttccagtcttaagatgcacatgtgaaaagctgcctgtcacatgaaagagtttgatgccatgtagcttgtcatgttgtcagactctgtccctggagtgtgcccctcacgtttttgtgcatgtcactgtggcatttatgtgactggtctgcgcttctttctcctttttacccctttggctgcaggatgttgaagtgcacttcagttttgtcgttctcatttcccttctggattcttgctcctctcctacttctgctgcctccttcctcagtcccccattgccttcagctgccctgtggttgcagtttaaaaaaaaacaacaaaaaaaacacaacaaaacaaacacacaacagcctatttagatgtatacctttgactttatgagggctgtggttttgtgggaagagcagggtctcacccttattagactgtggttcataatcacttaaagagaacgtcattcttggagttactcatctgaaaaagaagcctgctcctccaactggaaggggaatggggctggggagggagggggttactgttggatggaactgtgcttggctattggacctgagtgactgaacacagtgtccatgaaggagctggctaggcatgtgttctgcggggaccagccctgtgagggcagaggactaagaagcgaaggatatgggcaaggaaactgtggaagtcatacctgcctttttgggccagagtacatgtatcttttatttttttttgagacgtagtctggctcggtcgcccaggctgcagtgcagtggtaagatctcggctcactgcaagctccacctcccgggttcacgcccttctcctgcctcagcctcccgagtggctgggcctacaggcacctgccaccacgcctggttaatttttttttgtatttttagtagagacggggtttcaccgtgttagccaggatggtctcgatctcctgacctcattatctgcccgcctcggcctcccaaagtgctgggattacaggcatgagccaccgtgcccggcctaagagtacatgtatcttaagaccacatcctggattggtagatacagaaggtttactccttgggcagtgctggactcttgatgaagtagcaggtagaggatgaagtttggggactttgtgcctctcacatttatgcctgctttttaatgtagcccaataacaaaaggtcatgctattggtgatgggtgggtaaggtacctactaacagtaagtttagcttagggagaggtaagccattttaagtctatcagtatataatggatcacagaaggagagagtgggagacactcagtctatcagaaaacataggatggatgtgccacagaggaagaagttgtcacttaacaatgagtgtggaaaaaaacaaagtttatcagtgtctgtgtgggcgttatttatttggggacagcatcctaaggcaggcatattcccacagtggaaatggatgtggtgtgatgccatgaacttgtgaagcaagtgagtccctttgttgtgattccaaatttactcagcacataactgattattatctgctccccagtgtagttgtagtgggacagattacattgcccagaagagttcagtattcagtcttcttggtggttattttgttgtaaattaataatactgatagtatgtcattttgctttttataattgattgtctttaactttgccctgaggcatttttcctaatcaactctagaccatgatagagcctttgggccacaagactaacagtcttaccttgaaccaccagtcagtgaggtgtttgggaaaaccttttcctggtgatgtctcatcttttccttctacagtcaccaatgtcatatttactgtgttaagatgctaggctttgtactggcttgtttacttctcacgatttatcttgcagtatgatagtttgtgtgacactgaaaaaaattagtaggactgttaaaatagttttttccccccattaaaagtagaatgacaccgttttgcttctgaagaatttggctttaactggtttatattttgagctgggtattaaaggagaattatggtagggtaaacacaattagtgacatctggttgccccaagaatcaataatatctgatactacatacataaatagatatctatgttgtgataatatatcttagtttcactgggtaaaactagaagaataaaaaatttgaaaacagcttggttactgactaagctgcagcagttctgagagcctactgttgtcatttttaatgggcagccttgtacttccatagattggttaatcttaaaggccagatggtagttgtattgtaatttcataaagattttatgtcctatgttttgctttcaactagaagcatgagaatttaggaaagttatattgagacatataaataataaaaattggtgaatcattttacctaacaatttattgatattactcaacacaaggagaaaaattagaaaatggaccttaacaccactgtctactatgaagacagtatagaggaggcaggaaaaacagaaagcacacaataacatgatagctataaattcaagtgtcagtaattacaataaatgtaaatagactagaggattctgctaaaagacacgtcagattggattaaaaacatctgagatactaggtttacaagaagcatatctaaaaacaaagatacagaaggcaaaataatggaaaattttatttcaggctcactttaagcaaaataaagctggtataacatgttgatatcagacaacatagaaatcaaggcaaaaggcattagagatgaagaggatcactgcacagtggtaaaaggttcagttcagatataggtacatattatataaagcaaaaatatacagaaacaagaaaaatagctgaatgcacaatcctagtgggaagttaacatacctttctgaatagtacaacttgcagacagaaatcttaggatatggaagacttaaagaacatgatcaatgaacaaatctgacctcatggacattcatagaatgttacagttcctgtataatccattcttttcaagcacatggagcatctgacattgattacatataggaatataaagcaagtattgataaatttcaaatgattgaaatcatgtagagtatttttcttacggaattatagaaggaatcaaccaaaagataacaggaaaatccttgtatgtcaataaattaagaagtatatttcttataatgtataatatataattttataaatatataaatatatatttataaaagtttcatttaaaaagttttacaaaatggaaaaatctgtcacttaaatacaaaatcactgtacttctgaccctactaaatgtaaaaattgtcaggatttgggaggttttttttttgatgtccaaatacttgatacacgttccagagatccccaatatttttgtgaattcttcttaggaggctagtgatcatgtatgtgggattaggaaagtaattgtttgagctaaatgggggaagagatcattcctgctggtagcagggagggtgtgccacgacgagagatctgtggatttactgaaaacacgagatttacatccagagcttagttcacaggctgtggctcctgtttttattcatttagaggctgatagaccagctgtgcctgtagttacgtgttctttggccagacacctaaggaaatttgaggctcagacaagctgaagtagatatttctgtttccatgttgaataacagagccactcatgggctgtcacagatacactgtttggggttttaccattccttcccatttccattcctgaaggaaaaagagaagagatttttctttttttttcagattattactgtgttggtgacctagggaaaccctttttttttctcttctcttttcacaaagttctgaggagcatgaaaaaattgaggtattcacagtgtctggggaggaaatgagttctgtcctgtattttccgaagagtgggaatctaaatcggaacaggcaccaggttgaagaaataatttgtcacatcatggatgcaggaacaagctctacatgggaatactttgttgtagttagggtctgtcttgagggaaaacaagacataaagggtatgtgaaatgttttctggtgatcatatcccaccgtgtcattagttcttttaaagtactttttctatattatcccaatttagctttttttgcaccctgcagcaattctatttctattttgtttcctgttatcattgttcccttttctgagtagaggatagataggtaagtggtgtaagtaatggcatggaaagatccaagaaccattaagtagattatatccctttttactatccttttcttaaagtgcttgacttaattctgaatagccacttacaaactttgatgagtatctttcatcttgggggttattttgaaaattgatggcatttggaataaaagttgctataaccttagtgtacgtttgggtttataaaatatactgaacataggaactcacatgactcccaatttttgaagtaaccataatttctaaaaaaaattcaaatgagctgagttacatttataccactcctgggaattattagaatagcatatgttctctgtttatgctctttgtaaaattggaaaagtaatgtgtagctctttttagtagtgccctgtgtgtagtttctgtaacagttctgtaactgtaacttaccattccagtctatttctgaatggttagtggagctgcccgtcaaagccagacctattacaagggatgatatttcccctgtcatgaatagaaactattgatgactcgattaacatacaaggatgatacagttcatggttaaagggagcatgcttccttttgctggtgaaggaacattaactgtagatttcatctagaagatcactagaaaaagcagcctcccatgtttgagcgtgtcctgcatgtcagtttccatgcagatgctttctgtacgtcttcacgtcctcctcatccatgaggttggaggtgaaagttacgtaactgacttgctcagggaacacatttcatgttgcaaccgggctccatagccacatttcagaccatttttcttttctttttttttttttttgggacagactctcgctctgttgcccaggctggagtgcagtggcgagatctcggctcgctgcaagctccgcctcctgggttcacaccattcttttgcctcagcctcagcctcccaagtagctgggactgcaggcacccgccaccacacccggctaattttttgtatttttagtagtgatggggtttcactgtgttagctaggatggtcttgatctcctgacctcatgatctgcctgccttggcctcccaaagtgctgggattacagcgcctggcctgaccatttttcatttaaccagcattcagattattaagtcaaacggaaaaaaaaaacagggatataaacctattagaaaccaatgtgactgtttcatgccttacatttatgtctggaaagttgaatataaggaaaaagttgttttttgaaatagtttttcattggttccaatgattattcgagagttttccgtgaaagaagtataggtaacataataaaagttaaagttaacagtcttaacacttcaattgtaagaatattttgtggtgtcagtgtattaatagctcctgaaagaaaattgtcaaatgtaatcagtctacatttttttcatgtgtatcaaagctacccatttattaaatcacagaagttaattgtgtttcattgggaattaatattgactttataggtcttgggtagattatttaaatagccctgctagctaatatgttaacccctgcccttattacaaatacatcctgacggataagggcaaaatattattgactagattatgcttgaatatctcaaaatgaaaacagaatgaagcagctaaccaaggaaacgattggacttaaagtgtacgtacttgatcacgttaaagaggcctcactgctgtgtaacaatagatgcttaaaataatccaccagccaacactcactacatgtgaaagtggtttactttcttgtgtctgtggggaagctctaattatatgattataattaagctacagtttattttctcattttctctgattaaattgtggtgggaaatatctggccaaatctagtcttttcttagtcatgttatttgttaattccattgacacatcttattaaaatttgcagcaaggtgttttcctgttaaagtaattgaagatttcagagtatcttatatctaaaaattgtgaatattctctgaaactagacctaaagttcttaaaatataaatgcgtcattcacgtagattatggagttacttttaaaatgtagctatccactgaagaaaattgtgaaaatgtcccattaacgatttgcaaatttatttatttagagatggggtcttgctttgttgcctggggtggagtgcaatggtgcgatcgtagctcgccatggcctccaactcctgtgctcaagcagtcttcctgctgcctcagcctcccatgttgcttgcaattacaggcctgagccactgggcctggctgccatttgtaaatttaaatcttaacacttatgtggtgtttccagttagatttcttctccgttctttgcatcaccttcttagatcttccccattcttctcaatcccctgttccctccatcttcacggtacctttcatggaggaaatagaagccatcactgggaataccctcagctttccaccgacaaatctattcctgcagacacccgtcattgcaatttatattttaacaaaggcttctgatcctaatttcaggaaatagcctctaaactcatctattagtcccaaattctttacccatttaatctgctattttatgcctcctatattcttaccttcagatgttgagaggttggggcataaaactttgcagcatgtctgcagtcttccctctagagtgaacttgatcctgctgtttgttctttttattctcttcaaagttaaatcatgttccagcattcatggtatttctccagcttgtcctccacgctcaccccattgtcatgaggactgcactgaacaaatagacaccttatagtgcttataggccatagttgctgacagataacacggtttaaaaaggaagtttcacagccttgtagcttatgaattcccatgtcagcctcattagcttttacaagctattttcttagcttgtaagaatgttgctagggattcacagttaatataaatatctgtagttttggaaaattgagacagtgcttgcccttctctagtcatcctgtaccttttagatttgacctcttttttggggggtgggggttggtggtgaaatataacaaagtgcataaagcagatgtacagttcaaccaactgtaaaataaacatctgggcagttgccgtgcacatcaagaagtaggacgctgccagctctcggaagccctcgtgtttgttaccgctctttaaagattgaggcaggtgttccatgaccttatccccaagtctctgtgttataattcatacgagttgggaggctgcagtatatttggatgatctaagacctcctcctttatttttgcttaccattggattttagttttctctttccaatgtttattttctgtgtgtattctgaagataattttatctgaccaagaaagtaggtatagaactaagtgtgttgtctgtaattgtttgttacaatataatataactaaggaaactttttcaatttttgcaaacccaattttattctgctattgtttcctgataggaattttgggaattttagagatccctgcgttcttttgtacaaaaaatacatctttctgaggccaggcacggtggctcatgcctgtaatcccagcactttgggaggccgaggccagtggatcacgaggtcaggagttcaagaccagcctgaccaacatggtgaaaccccatctctactaaaaatataaaattagctgggcatggtggtgcgtgcttctaatcccagctactcaggaggctgaggcagaagaaccgcttgaacctgggaggcagaggttgcagtgagccgagatagtgccactgcactccagcctgggtgacagagcgagactctctcgaaaaaaaaaaaaaaaaaaaaaagatacttctttctgttaaacatttcctttaaaaatctaaactcatcagaaaaatacctgcttgaccacattaatttcttgaagtatctctttcttttccttttggaatcatgtgtttgtaaagtcacatgatttaatcttctagagactctggatgcttctgttgttgatgtatatgtgcacactcacagtcttaaggaatttggcattttatgtttcactgtctttttactcttgctccccttcttttagtgtttttttttttttttttttttttttttttttttttttttgaggcagggtctcactctgttgcccaggctggagtgcaatggtgcgatcacggctcactgcagcctcagtctccctgggctcaggtgatcttcccacctcagtctccctggcatctgggtttcaggtgcatgccacgatacctggcttaatttttttttttgtagagatggggtcttgttgtgttgcccaggctagccttgaacacctgtgctcaagcaatcctcctcccttggcctcccgaagtgctgggatgacaggcatgagccgcacgcccagcccactccccttcctcaccagtcttgagcctcctgttctcctttttcccctgtctaggccctcacatccctccacttttctctttttccccatgacttggtcatgacacagaaacaaagtccccagtgacagtatcttctcaaaaaccaaacagtaaactctgaactttctttgctattggattcatgatttgtgattaagcgtattttcccctttgcaggctcttagttatgtgtggtagatgtacttctaaattacatttgctttaaaaatataaaaagtatagagtaacataaatgatgtagcataataaaactttaaatcattaatgatattcatagattgacatataagctattcccagtcattttctttttttctttttttttgggggatggacagagtcttactctgtgtcccaggctggagtgcagtgacaggatctcggctcactgcaacctctgcctcctggattccagcgattctcctgcgtcagcttcctgagtagctcagactacaggcccatgccaccacccccagctaatttttgtatttttagtagaggcagggtttcaccatgttggccaggttggttttgaactcccgacctcaagtgatctgcccgtctcagcctcccaaagtgctgggattagaagcatggaccaccatgcccagccctcattcatttcttgtactagaagtggtgatctttgacaatttgttttaatatgaagttgttttaatgaggggcaaatatttggagcaattagctaatcattacaacgttttttttttttttcttgttttgtttttctcttttctttttttcccccagctactgctcctcgcagagcagggctaacccataggtagtgtgcccagagtcagccatcattacattgttcacgcttacagcataagttaaggtaggactcaaaaaatttttctgtaaagacaatctcagaattaagtgctttcaggaattactatgcagctagaattttctgtaggattgaaggttctagcagctttgagcattgatactgatcttgagaatgaatccaattggcagtcatcccctggaagacttaatttgaggtctttatacgtacttgcgctacagtaaataagaatgtgtcctagatggaggcaaaatggggtgggtttcaagcatttaataaatgtgttaaacattttaactattatttcctcttttcaatttcaaatagtgttaaatgattgttatgggtaggaatagggtaaacccatttctagggcatggtttagaacattggtgcagtttttttcccaagaatatcttaatcacagccctggtttttagtctgtttttctaagaactccgggagttatgctggtttcctcagggattgtttttggcattttcctcatcatagaaccttatggcatcaccttggagacacagcgttagtttaaggaatggacatgtgatcacgcaggtcaattggagtcccatttggtgcttttctgtaggagtagcagggagagactgcctcttctggttggattgctagtggtgtgtgggctgccaagtggcccccttcctggcaccaagcagaatgcagcacacacagggagcagagcccggaggcttgagcctgatggcacttgaggaatctgggtcctggaatggtagatgtcctccatgctacccacttgcatagtgaatacattgcctttttgtctaaggttaagttttcgttgttgttgttacatgcagaattgagaaatatggccaatatcttagggaaggtggcaagttaggaactgtactagcaggctattaaaagaatcacagaggctagtagcctttagtttttaattttttgattgtctatttttgcttgtttgtgatgagtatttctacacctggccagggatgcattcagataaacattttggatacctcctctaaagtgtctgtccacaccacaggatcaccgcctggtcccttagtgctgacattccactccaggagatgctgggctcccgggtggcgcgctgtgaggatgctcgagctgtatcaattgtgaacctcactttcaggagttcagtaattgtgagacggtatcttcaggcattgtggaactctttgggggatgtgacattccagggcattctggagaaaggaataatgttcagtaataaaaccctggagacaggaattcttactgtacctgtgacccatgaagtcttagggcaaatgtagaaggctctgtttggctgaatgaatcttgaggcatccaccttgccttggagttactttatttacagcaacagacacactcacaaagaaagtttgtaagcaaaatattacaacactttgttttgcttctggttctgccattctgctgtcatctttgcaagctgcaaaatgtgagggacaggagaagagaagtttttttcctcttatgtcatggccttcagcattcttagaccagagcctgctttctttaacactctaaccacttttattagtttgcttattcagtggtagaatgtaaactccaagaggtcaggagtcacactagtcactatattcctggatagccccagccaaatacctgacacagcaggtgcttgatagacaatctgttgaattatatgcaatctgttgaatgaagctcttaagttatctagattttaggaactactggggcagattctcatcagacaggtgcaaagaatgggtattttaaagcaattagatttaacagaacatcattatgcaaatgtagctctgggatgtcccactcagatgccaggcttataatgttattgaagtgttacatgaatttgtgtgtgtttgtgggcggagtggattctcttgttaatattgggcctcaggtttattgatattttcgatagaaataacttgaaaattgctgatgaaagatacaaatgtttctttcccaggtgttttaaattttcttaggaatatatgacaagctggcgttggattgcgtgtcctaggttttgttaccttggcccagtgctgctgtcactatcccaaccacctggtctgtctgatcctggagcactgggtgagaagctgtttattctgtcagtctgactgtattagcagtcccccctccccacagaggcagagaagactccactctgttatgtaattgtgagtgctgggagatagtggggggagttataatttagggaatttccatattggagatagtactgcctatgtgtcatgatgcatttgacatcatatgggttattcatcgatgggttattcaacacgtttgaatagtaaggcctccaattgccatttatagcatatgtgctaaagaaacaaaatggtgtgttgggagttacatccatcatctttcccctttggttgaaatttaaagtgacagactgttgtactttaaaaaccgtattgatcaaatcatcttaaacacatactaaattcctagaaaaaaatctgcaattgatactgtagttttttctatattacaattatttatggccaggtgtggtggctcatgcctgtaaactcttcgggagattgaaacgggaggattgcactcgcatctggataacagagtgagaccgtgtcccttaaaaaattcattttaaaacccgaattgaaattagtcgtaaatttttaaacacttatggtgagaacatttgcatttctatcataggacctctgtgttccttgttcttctattccactttcttgtcccaccttctggtaactgtggttcttgctttttctgtttcaagttcttgcccttggcttctcttcccttcccagcatctctgcctgccttgggtttctttctactctctcaccttcgtttcccacatcttctctatttgttctccgccctgtgattcactctatatttaaatctacaattttaccctccctcgttggtttattttttaattgtttctaaatctcagtaagcaatttgaaataagagcaaggtgtggtgcctgatcaattaccctatggctgccacctctttagaactattggcttagaaatcacctttggtcacacgaaatagggcatttattgcaggtttattagtggggagaaataacaattgttccatgcacagtattggtgcgtttctattctcaatcaatcaagaataaccggtgaattttccaagatggttatttaaagtgctatactaataatactgaaagtaagccatatgcacaacctggcaattttttaaaatatcttttaagtactatatatctaagagcagattacattttcagtggcagtcctcattttctccacattgagttatgtcttggtaccacgctttattgcaaaactctcacaactaaaggatttaaagtttattattgcgattttaaagcaggatagaaaggaaaggagagaaaaataatttttctgagtgaagggacctagttcttataatagcattttgatctgaggactgtgctgtgataaataactcttactgtagaatctagatgaaattaaccctgggagaaccctatatatccctgaggcatttggtggccgactacgacagtgtgtaatctgttttcacatagtatagtacacagatgtatatgtgagctgagtgtaaatgcagacttctttcacctttttgaagactatctttttgaagacttttcttggagaggatttatctaacacctgtttgaatcttctctttttgttatcgtggtgatcttatttgagtagtattttggtgattgtgtttgatcataaatatatagcagcagaaaatttttgcagcaccaaactcataattcttggatttaccatatctaaaggaatgccaattttgcatattttttcctatatctttacaagcctcattaaaatattaaacttaaaaattttttaaagcataattgcgtttttcttttcaaacttctgaagaaatgtacaagatttaaaattaattttgataaattaatttgcatttactttgtaagccagcactttgtagtgtgaaataatattgaaaatgggaaacaatatgtattgataattaaatgaatatacaaccagttttcttcccggaagacattttcatgtaccatgtaaaaggtactttttggaattatttatacttttatagttttccatgcgtgtgtgattagacttctgagaaaaccttggataattttacgatgataaacatttatatttcatttcagtgtagttcagtcacttaaaaatatccacttaattttattttggggacaactgtagattcacaagcggttataagaaataatacagagaaatcctctgcccccttcatcagtttccccttatggtggcatcttgttaaatgtggagcaatgccacatctaggatattgactttagtacagtcaagaaacagaacgtttccatcaccacaaggatctctcatgttgcccttctgcagccacactgacctctcctatctccttccacactgctcggcaaccatgaatctgttctccatttctataaatttatcatttcaaaaatgttatataaatagaattatactttggatattgctcttttttcattcagcatagttccctgacgattcatctagattgttttctatttcagtaattcatttcttttttattaagtagtgttccatggaaactgtgtaccacagattgtttaaccattcacctattaaagacatctgggttgtttccatgtttcggtggttacaaataaagtcgctataaacatttgtctatagattttattgtgtatccatttttttctgtgataagtgcctaggaattcagttgttggcttgtatgttaattgtatgtttgttgtttaagacagcggcccccaacctttttggcaccagggaccggtttcttcaaagacagtttttccatggaccaagggtgggaggtggtgtggatggttttgggatgaaactgttccacctcacgtcatcaggcattaggttttcacaagaagcacgcagtctagatccctcacctgtgcagttcacagtagggtttgtgctcctatgagaatctaatgctgctgctgatttgcccggaggagctcaggcgggaatgctccttcgtccactgctcccctcctgctgtgcagcctggttcctaacaggtcatggactggtaacagttgttggcctgggggttggggacccctggtttaagaaaccttttttgaagtgttatactattttacgttgtcaccagaaatgtgtgaatgtgatccagtttcacatcctcatcattatttggtgttaccattatctttcattttggccattctgagatgtatgtggtgataccttattttggttttaatttgcattcccctaatgttgaacattgttttttcatgtgcttgtttgtcatctctatatcctcttcagtgaaacgtttatgtcttttatccattttctaactggatcgtttttcactgttgaattttaagagttctttatatattttagatactaggcatttgttgaacatttggcgtacaaatatattctcactctgtagactctatttccattcttttaacagggtcttttgcgtagaaaatgtttttaattttgatgaagtcagattgataagttttttcttttatgggtcatgcttttgctgtcgagactaagaattctgcctagacttggatcctgaaaattttctcgtgtgttggtttcttttaaaagttctgtagttttatgtttcacattaaagtccatggcacattttgagttaacttttgtatatggttgaggttctttttttgcttttaaacccatggatatgcaattgctcctgcaccatttgttgaaaagcctattttttctccattgaattttttttgcacctctctcaaaaatcacttggacatatctgttcatctgtttttgcattttctactctatttcattgatctgtgtatgtcccccagctgataatatattgtcttgattactatagctatataataagctttgaaatcaggtacactgatgattgcccctttattttctttttcaaaattgtttctggttattctagttcctttgtcttttcagataaattttagcatacacttttctgtatctagaaaaaaatcttgctgtgattttgataggaattgcatcaaatctttggaagaattgacatctttactgtgttgagtcttccaatctatgaacatggtatgtctcaccatttgtttacatcattgatttctttcatcagcatttttagttttcagtatatgagtcctgtacatgtttcggtagctttacacttaagaacttaattttctttggagcgattgtaagtagtattgtattttaaattttggtgtcagtgtgttcactgctagcatataggagtttttatcttatatcctgtgaccttgctgatttgaggccgcaacttctgcagtgtaatgtaaagccattgaacatggagagggcaaaacaaaaaagtaaattggagtgcctcatacaggagtagattgtttgctagagaatggtggtagtggacatgtgtctcaattgtattcattttcagtttgagtgagtcacttttcatcttgtgcttttctaacacctggaacctcttttccaagaaactctggttccttttaggggagaataatttgaaaaccaagattctgggtaccattgcaataggaggccattacttcagaactctttcagtggtcggaactaagaaataaaaataattgagtttgtatcaatgttttcaattcaaatttagcagaaaaattcttccccttaacttatttcattatatatttctattcattttctcttacactgaaaatagtgatttcttaatgatatcaacttatttgctttatcttactatacacataaatgttttaaaattgctgtattaaaattaaaactattgaataaaatttaagatttccttgcaggtttttttgaagggcatagtcctttcaatatatactgctgaggatgtagagacagaacactgactttagaagtctcttcaagtcttttttccaggctgggcgtggtggctcatgcctgtagtcccagcactttgggaggccgaggtgggtgtatcacctgaggtcagtcaggagtttgagaccagcctggccaacatggtgaaactctgtctctactaaaaatacaaaaaaattagctaggcgtggtggcgggcaccggtaatcccagccacttgggaggctgaggcaggagaattgcttgaacctgcgaggcagaggttgcaatgagccgagattgtgccattgcactccagcttgggcgacaagaatgaaattctgtctcaaaaaaaaaaaaaagtctcttcatatattttttctgtgtagatattttaccgattcgatgttaatagtggtttatttctgtttctctaattctgagttttcaatttctggattaattctttccatataaataggtttgaagtcaaaattaaataaaaagttctacatagagaagcattctctgttttcattcttcccagtatcaccctataggtaaccatttttattacttttttgttgtaaaagaaagtacttgctttttcttccttctcatacacaatgtagtagtctatggtctctggtctcctcctttctttttttttttatttcacaatatattttggagattactccattatagcacatagagatcttcctcactcctttttacagttacattaagtactgggtaattttgccatgtgtacttttattagatcctgcagaattcccctttatggggattttattttgtactttcatcaacagtgtttgtgacgttcagtttcttctgaggcttgtcacaagagcagatttttgccagataggtgagaagtgctatttcagtgtagtttttatttacatttatggggatagttgaacatctttaaaaacatttaaagacttttgtctttttgtcaactgttggttcatgtcttttgcctatttgtatattggatttttgataattattgtttttattttatttatttatttattttgagacagagtcttgctctgtcaccaggttggagtgcagtggcgtgatctcagctcactgcaacctctgcctcctgggttcaagcaattctcctgcctcagcctcccaagtaactgggattacaggcatgcaccaccatgcccagctaatttttgtatttttagtagagacagggttttaccatgttggccaggatggtctcgatctcctgacctcgtgatccacctgcctcagcctcccaaagtgctgggattacaggcgtgagctaccgcgcccggcctattgtttttatttctaaagaggaaggaagattatttatttggaagataagttgtgaaagttacttcccagtttgccattggtcttttgactttgcctacaattttattttatttatttatttatttatttttatttttattttttgccaggaatgagttttaaagaatgtatcttttttatatttgtaatttgtcatcgttgtaatttcatgtgatctggatctttaggtacatgtttcacaatggatggaatagaaaagttaggaattttgtgtaggaaagcaaggaatagaatagaaaataaaatagaaaagttaggaattactttttatgtttgcattctctagctgctcactttttttgactatatttcaagccaactgtcacagggcatcattccaggtcctattttggtttctttcctcagtcaatactagaaaaccacagagtgccattcccggcatttcatctatcccatacttgtcatttgtaaaacaagtgcctagtgatgttaattatttctgtagagttgcatttatgctcttttaatttttctgtatttgtgctgaatttccatagtctgtggacagatttgctctgggtgctatagtcagctgagttggagtctagaccatttataacttaactcttcgacctatttaactgtctgcttccttgctcttagtttgagttactcaaattccagttgccttaactgtaaaattggctagtagagccatgtacctccagggaattcagtgtattgtttagatgatgattaggtcttatttatgttttcatataagctattataacaaaattgcagtttaaaatgaatatataggaaaatgttttctttagaaacttagaataaaccagaacattcttaaatttccacttattgcatgttgatggagcttgactctcttccctgtaaggatgaacattgcagaaagactgtgaaaaagtggtgccatcacatcatcagatctcttattgcagaagttataattctaagagaaaacaatctgcaataaggagttctatcatatttttgtaagtatattattgacttccaattaaaattagtcctagtaataatggcatctgtgaataaggaaatctgaaaccaataacgtgtaaaattgagttaaatattgttgagccagttatataagtcatgttaatttctaggtgttacaaacagaagaaagtgttctcaagcttctccgttccccagacagaatctgctgggttcctgctattgacatcaaagttacttgttctcccattaggctgctgttaaaacgaacacttaaaaattatcttttgtccatcatacttttgtgggaaacatttttctccaatggatttcaaatcccatatctcttactatggtatttccatccaattttcatggttttgaagcagagcaatcagtatggagtagggggatggagtgaaaatgataactttataattaaaatcggcacggaagggtttggatcacgggatggtgggattaaaggtgtaacctgtgaggacagtaacagaggagacccactggaaacattgtaggacttggagagcctgtcgggtgagtgccctggggatctttatgtgcccatttgtcattttcacttctagaagtgagaagcatcaggacactgtctgtgccacctctgtcttcccactctattccaaacctcctgggctggtaggagggctgaatgagataacacaaagcacttagaaccgtgtgtgacatgtattaggaactgaagaagagttagctattacacataacatttgattggtattaaataatataaacattgcttcctgtactctctattatataaataaagagcaaggaatggtgtgtaattctgtgaaactgtgtagtctcagatttggatctgtctttgcatgtgctgcttcctcctgccccagttagtaagtgtcaataatcatgtaaattcttttttttctttccttttcttttttcttttttttctttttgagacagagtcttgctctgttggccaggctggtgtgcaatggtgtgatattggctcactgcaacctctgcctcccaggctcaagcaattgtcatgcctcagtttccttagtagctgggattacaggtgtgtgctaccatgcttggctgattttttgtatttttagtagagacggggtttcaccatgttggcgaggctggtctcaaactccttaagcagtccacctgcctcggcctcccaaagtgctgggattacagacgtgacccagtgcacccaccaataatgtaaattcttactgaaacagtcatgcttgtgtaggtactgtctgtggtcacttttgttctacaatgacagagctgtgtagatgtgacagagattatacagcctgcaaaacaaaatacttagtatctggcctgttatagggcaagcttgccaactcttacatacagagtgttctgatccaaggaaaaagtaataaaaagtacccaattatagagcagcttcctgaaatcaacatttgttctttcttttacatctcctattgaagaataggatgttgtatataagaggatagcacaaaatgtttcctcaagttttcatttatgtcactgaagagttgactttaaagaattattataaattaataaaatgtaaccatttggaataagctatgtaaatgaatttgaaagtttgaagttgttgcttttctttagtaatgaaaaactaacccatgaaatgtgtggtagatttttcacttattaagagtaaatatgcgcatttatggcgtgcagtgtttcacttaagaaagtgggtatttcagggcagcacctagccactgctggtgtacagtgcggactgggagcacagtgccctaggcacaggcagcctgtgagtatccgtggcagttcgtttctaactagcaaaggaaaaggacttctaaaatcaatactggttttaaaatgtatcattactgttatttggctcagttggattcagagccataataaatagtatgaacatcggcctaagttaaagtttgcatttagacctgattgtgaatggaaagatgtacatatgacttgagagagtatggttttgacagagtggttgttaatgcctcagaactaaagaggtttcatgaatacataggttttcagtacagtctccttaccggcaggggaatatcagacaagtggtgtttttcagacagtgaagcagatggctctttctcttcagtacagggtgtaccaacaaagagagacagttacacaaatgttaacccctgagggagagagaaaacaattgcagtcagttgttctttataagtctgtatcttgacttcacagtggtgtgaaaaagtaatttcttcttttataaaaagcattaaatgcacaggagcagcctgtaatctgagtccaactaaaatggtggaagatgatgtaatcacttaaaaaggaaacagactgttatgtttgacatttctggagtaacgtggtggtggactacttgggcccgatataccgcttccaaattctcgttaaaacgtccagcagttgtgctataaagcaaattgccatatgccaagatctgggcagaatgttcttcaatatggctggtgaaacagattgcgaatggtcttggactatatagcacatgttctattctctgaactagaacaagacaaatgccccacgctgggtaggacatgttttaaaattcatgtacacagtgtgcatagctttgggaggccttgggtcatgctgagtggtccaagtttgtcattcccagtctgtggagccagtcatacctgggtccctcacctgctcctcctctgtctccactagctcctttctctccactttgacttaaaaacccaaactcccaacatgcagccccgcagcaggaggcagagggaggtgctaagggtgccgtccaaccctgactgcaaatcacttaaaagctttttgaaacggaggaagagccgtgcatccccgtgtttcgtgtacaacatatgatacatgtgacagttgacaagagtgcctgagtctcagagcaggaagagttatcctgcctccacatgcattgaagggaatatatgtcacacgttactagccaggctcagaggagaacacatctcatttacaagttcaaatctgaaagggagaaatgtgctagtatttagtggatcttgaggaaactagggatgtgttacccatctgtgcaggaacattagatctagatggggctctcctagtcaaaacgctgagcatgtggcgtaggaaaaaatttccaggatgcaggggaaggacagaatgacttggaggacagtgtctctctctgaaaatggttacatgtgaaacacaggtaacaaatttaggataaatctggtatcttaaaaaaagaaacatgactttgggaaaagaagaaaccagggggccctaagggggaaaagactgagatgaaaacagaaacatacaaacaaaaaagctgatcgaaataaaagaatgcgaggaaaccaaaactgcaatgagacttaaaatccctactaagataatcagaagacttgatctccaaaaatagaagaggagtatggatggcaaacttggacactctcaggatgcagaggagaaaaagataaaagtgggtaaatacgaaaggtagacgtggaggacagataatggatccttcacccaagaggagttcctgaacaggaaactgaagtcatctggaaaaccacaattaaattgactgcactgcagaagagtgtgagtaaatagcataagaaaccctgacagtcggccaaaattaacgaacagaggtttctacttagatctatcctcacaatttgaatttttaggataaaacaatcccaggagatagagcaggttgtgaagaaacacaggttaggtttgtctcaggtatcttgtctattaaatgctaggaatctgtaaggctgtggttcagtaactgtcatcagctacgttgttaacatacagtttacaggctattcagatgtaaaacaacagcatttatgttccattcaccccttaaaaagctacataaatatgagtttcatccacggaggagaccacccttagattttaggttatgtctctgactttgaagggagagagtctggagcagtgcgaagtcttacagcttcctgaccttttgggaggttgggaaatatttatgtgtgtcctgtgactggtagttagcagaaaaggctcccaagctagtccaacacaactgatcaggaagttgggtcatccaacagaaaatgtagcccacgttacagttagaaaattaaaaatccagggctaggcaaatgctttcttaaatatgatatgaaaagcacaagcaataaaaggaaaatgataaattgaacttaatcaaaatggaaaacctctgtgcttcagaacacgccctattgcctcttaccctgtgtaactaggagggagcccatctgaggacaattcaatacctcaggagggcagagcggaagagggcaagaccctgagctttgagaacgtcactgggcccccaaaatgaaccctgtaacttgctgtacctctgggttgattgttgtgtgagatggtcagtttctctgttgtgagagttggagtttgttacttgcagctgactacatccttagtgatccatgctgaaagaaaaagttaatgccagcccaggaagagagcacacagtgtaggagagcgtgcattgcaggctttactggcagaattgcaaatgtgtaaaggtgatggattttatttcaaaagccagagttacctaaattctcacattgtagaaacttgcttcagtctgtttcttatattcccaattttaaaatactttatacaagacataggaaaagaaaaatgcaggcttttgatgctgaaacttaaattttgtaaactaaaatccagtggttaatttgaaaagtaacatcaagtagagtttattctatgctcaatattaagaattattgcttagtattaagaaatttcctatacggatgtagtgtgttttacagtggcgctatgtccttataaactgataagctgaaaatattgtaagttgaaaatgcatacacctaacctactgaacatcatagcctagcctaccctaccttaaacgtgctcagagcacttacattagcctagaagggcagaatcacctaacacgaatcctgtcttataatcaagtgttgaaagtctcatataatttattgaacactaagcgaaagtgaagaacagaatggttgtatgggtcccattgcaaagttgaaaaattgcaagtcaggttctctctgtaattcaaattatgaacaagtcaatgacagaaaaccatatggtctcaatagatgttagggaggtacttgacaaaacttaacatctatcccttctaaaaagaaaatcccttagtaaaaggattgaaaggtgttttccatcttaacatagtcaaaggtgtgttgcaaattaatagtcaacatcatttatgacagtgaaaccctagaaacatttaagcttcccaaataaggttgttggcaacaccattaaaaatgttctgttctttttttttttggatgtgcgatactttacttggcactaaaaagtaaatactaaatgacaagagaaagcaaaattgttatttgaagatattatatgattagaaaaacaaaggtcaacagacaaatggttagaagcaatttaataaaagtgcttgttcacaaattcagtgtacaaacttcagtagcttttgtatatattaaccatttataatcaacaacaaagaagacctcattcacaatcacaagcccaaaaacttgaaataaacttgataagtacatgatttatatgaagaaaaccataaaactttaaagaggatctttaaaaagtttgaaaacatgaagtcatactttgttttaacataagaatagctaactttgtaaaatgccatgtttctttgctctgtaaattaaatgtcatctcagtccaaattgtggatttttcttttttttaacttgacactctgatatccacggtaattggagcaatggaagtcttggatttgctgcagtgtgttttgcatagttgaaggactggggaattgggggagagctgagtctggaatcaggaacccactgttgcctaaagtggctcactccttatgagcaataccaccccacttaactgatctgaagttttccacttgggatatgttccttttctggaagacttgtgacttctgcccccaagctgtgcacaggaggactcactgtcatcagatgctgtggttacacaaaatatttttttctacaattgattttcttcacataaatcgtgtacttgtcaagtctttggaggttgggttgccttactgtagtgtcatagccagtcacagacctggcagcagtgcattgtaactctgaaagcccttcagtggctgccaccagaaggtctctctcctgcatactcctttggccactatacaggtcttccaatttaacctacactatatttttactggccttttttccagtgctttgaataaggtacgtttttccccaccccagaacctttacatattctgttccctctgcctagaccaatttctaaccatgctctgctcctccagtccccactacacacacccacacccccacacccccggtcaactctaattcacctttcaggtctcagattcagtaatatttcttcaaagagactttttaaaatttttcagaattgattaggtccccttgttatgcccattatttcagattgtatgctttttttcccacagcacttaggtgtaatcatgtattttatgcagtttctttatagtctgtcactcccattgaaggacacagactgtgtctctttagttcactatcgtatatctaacacctgtaattgtatgtgccacatagtagacattcgttaaatattttttagtgaattaatgtgcagtgattttaagcaagtattagttgaataacgttttacatgtttaatgatgctgcatacgcattttccgatagtgtctaccacggtttatcacagaggccagtgtgggctctcacatgtaataaagctaatctgaagttaatttgcaaaaaaaaaaaaaaattgtgcattgtgagaaaattttagaaaacaaacactagtggagacttgcctttacatgtcacaaacttatgctaaagctgtaattgttaaatcagtataatactgacccaggactagacagaaaatgaaataaagtctagaagtaagcccaagtacatatgggggtttagtgtgtgttcaatgtatttcattttaaagtagtgtaaaatagatggttggttatcagcctgcaagttggctcccagtgatcattgccttgtagtattcttatccgtgtatagactctccttacatgtgtagggctgacctgtgtaaccagtaggatagaatgaagaggatagtgtgtgacttccaagggtaaatcatacaagacattgtaacctctgtcttgtgctcccttgcatcatttgctcttgggggagctggctacctttcgtgaggacactcaagcaactctgtggagaagtccttgtggagaggaactgaggccttggtcaaccgccaccatcaacttgcctgccatgtgggtgagccatctgggaagtggatcctccagccccagggaagccttcagatgacggcagctctgggaggcatcttgcctgcaacctcatgtggatacagctaaaccagagccacagaactaagctgctcctgaatttctgactcacagaaatggtgtgagaaaatgctgattgctgttttaagccatgaagttttggggtaattcatatacagcaataagtaactgatcagatggattattcagtcagtggtgtggggatagccagctagaattggggaaaaaataagttggattcttactgaattctgcatcaagaaaattccagatgtgctgggcatggtagcttatgcctgcaatcctagtgctttgggaggctgaggtaggaggattgcttgggcccaggagtttgaggctgcagtgagccatgatcatgcctctgcactccagcccgggtgacagagtgagaccctgccttgggggaaaaaaagaaaatctcagatggatcaaatatttaaatgtaaaaatggaaccgttaatttattataagcctgaaaaattttaaacttttggggtggagaaggatttcctaactatgaatatgcaatccccaagccataaattaaaataacaaaccttataaacagggtgaaagataaaccaccaattaggaagatttgagcaacctgtattacaaaaggcagtgtctcggagaactcttaaaaatcagtaagaagactctataaatgggatggctgaggacacgaacaggcaattcacaaagtagaaataaatgtatgaacagatattagccaagaaatataatttagaacaatgagaggtcacattgtatttaccagattcacagaggtgaaaaagaccgacaaggttaaagagattccttgattggcaggaagattatacggtgtgggtggggacacagatttgtctgacttttctggagggcagtctagtaacatgtctcaaaatgcaaataccaaatgagtgcacattgattcagctattgtgtaaatttatgctaaggtaatcggacacacacagaaagatgtgtatactgttaaaaaaaaatcccgaatttcaaaaatgtcaaattttcttcctttttcttttctttctttttttcctctatttccccttctattgtctctctttccagttcctcttggactttcctggatctgtctccacttctcaacattgtactcataccttttaaatcttggtttcttctcaatattagtaatttctttaattttaacttccttgttgccaactctctattctgaaatcgattctaacattcagccctgcttcgaaaagtttattttggcaattacttttgcaaaactaatttctgataaattttttcttttaggattctgttctgtagtgggtgtatagctgttcaatctctctgaggatatgaattagagttttaaaaacttgccttagacacgttgattgtggctgtttctcccagggtttgtggctgtgtgtcttcatcttgctccttccctcccatgctttaagatcttcaagtcctgatggtcctcagctaaatatccatgtttaacgataaaggactaggttaattaatactgcagctgccgcaggttttctctgtagttgtgtggacattccagctgccccctgcgctaaatggaggatggactgcaggctctggaatgtggtcaggttgcttggcaagcttccccgtggggtgctgtttgggtggggaaagctgggttccccccacactgctatcataagcagtacttggtcaggaggtgcagcagtgtaccctgtcaggcagagctgctgcttttcatcccacgactccccgtctctgtgtctgttgtaacagttctgagttccctttgttctctctcaagccctaatgtccacacctgaagctctccacagagaactcatccatgttgggttcctttttcactgccacacacagggcagggggctgtgtgtgggggtgcttcctagccacgctgttccaaactatatttttattttatcatttatttattatatatttatttttggagacagagtctcactctgttgcccaggctggagtgcagtggcacgatctcggctcactgcaacctccgcctcctgggctcaagcaattctcctgcgtcagcctcccgagtagctgggattacaggtgcacgccaccatgcccagctaatttttgtattttagtaaagatgggggtttcaccatgttggccaggctggtcttgaactcctgggctcaagtgatccgcctgcctcggcttcccaaagtgctgggattacaggcatgaaccactgcgccggcccccaaactctatttttaaatcaacttcttgttgagccactcttgcctgtatttgttggctctgagcttctcttggatcccttgagaactgctctcagtcatctttcgggggctacaattaacattgttctgtcttccaagagtccctcatagttttggtctcacatattttgtgttttctaggcattccataaaatatatggtctgctgatggcactggttttttgtcttgcaggattctttaattctacttaaaaacaaaagtccttgttagttcataagaccttgggtgggacgggaggtagacatttgtgctcagatgacctgttcttttttctgtgggtgttatcacttgcgtttcttcgagcatattcactttgacattttcttctgcttactgtatcagccatgtacccaggggtcaggagtgtacacatacacatgaggaaaccttgaggtcgggcagggatttggatccaggctgtgactccaaagcctgccctcttaacctctctgctgtctcttctgtttgtgcagtggggggccctctttcatgctgtttgtttacttcaaaggcttggtgtttcttgtatttctgttcacatttgtaggtaaggatctgcaactcagcgttgcgtgaaggttctcacgcaggagctcagcttcaggtgactttgcaggggaagggcagggagcatatagcggggcagggtattcactctgctgccctgctcgctggggggccggcggggtgggcttctgctccacggagttggtcactttgtcggctctgctgtcttccttgttaggacctctcatcggagagttgcatgcatgctcaccgacctcccaccccttccccggagcagacccctgagtcagacagttcaaacgaggacttgctcagctcttccagcttctcgttaattacttggccaattatctatggcctgcttctcctggcctgtgctgcactgataatgggattatgctgagcttctgctgaggaaacttttcaactgacatgggttccttctatttctttagatttgccatcattggtcccgtcacttttctagaaatttaatctgttccacaactctttattgtgcggggcaatgtgctgggcattagaaaataatggtgaagagaagacctgtcacgatggagcttatgtatggtcttgttggggagacaggcattaaacaattaatttgcacacacgtagttcttgttctgtgaggagaagttgccctgcgctgagggggcatatgaaaaggctaacttactgggagaggggttgccatggaagtccacctggagcacgtgtgacaattgacctgagattccaaggaagaaaaggagtgactcagtgaccgggaatggggataagagtgttccaagctttggaaacaggatggggaaagacctttattcgtagatggaggggaacggggtctgccagcatcactcctcaaggacatttactattgctgtggttcattttcattctgtatttttcttctgtttaatgggatttgggaggaagaaaaagatgaacttggttttgatccaagtaacctcagagaataatgacgtgggagcattttacaatgcaaacaataaatggaaaagcatgaatttatgtactgtatgtgaaatatatagacacatacatacatataggctgaacatcccaaatccgaaatttgcaatgttccaaaatccaaaacttcttgagccacctacatgatgctcaaactgagtgctcattggagcatttcagatttcgtatttttctatttgggatgctcagctagttgatatgaggcagatattcccaaatctgaaaaagattcaaaacctaatccaaaaatccaaaggctctctggtcctgaacctttcagataagggattttcaacctgtatttaatattgggaagcaatataccaataccaaaaacgttgtctgtgagaggtgagatgacaaatgatttttattacctttttaaaactcctaatttgaatttcaacttttctatgactgtggattgtttttataatcagaaaaaaagttcctaaaatgatgtttatcttatggtttggcttatgtaaatgcagagtttgtcactaggtcaatatccgcaacattataaagatgttactgtgtacttactggaaatggcctgtgattggtgacaaagctgacttacacaaaggagaacattatccttaggaattcttgctagtatctcataatgtaattgttttaacgttgttaaatggttcacagtgatcagagacttaaaatctttgtctcctacacagcgttttaagagttacagaaaagctatcattttgagctaccttgagactgaagtgtctgcagaatagcacttacatattcaggctgacaatatgtgtttgaggaattggcggttcagtttggccaactttggtgttgtaacacttgagattgtattaagctgcaagtaacaaattcagatgaacagttgcttaaccaagtaacttaaaggcacaagctttaagcttttaacgttttcaagttcaggtcatgtaggggagctatgtcattaaggagactgactctttctgtcttcttgatttactgtagagtacggcttttgacctcatcataacagagtggctgctgcccctctagaaactccatctgtgattcaggcgaaagggaagggcctgctagttggcttgtcctttttattttttatcagaaaaatagtagctttcaaagaaaccacccccattagacttccgtttatatttcagtgaccagaactgtgagaaagccgtctttagctgcaaggaaacctgagaaatcaagcttttgtggttatgtttttcaaactggagcacattgctgttcaaaacaaaatcagagttctgttaataaataaggagagaatggatattggtaggcaacttgctgtgtcagctgcaggagttatgtgcttagaggtggtaattgaagtcaagagtgtgattaacattactcagggggagtatacagagtaagaagagaatccatgaagggactgaaaggaagtttagtgttgaagagactggcagaagaataggtattctcaaagggaaccaagaacgaggggcaagtgggaggaggtggtcacctggagggtgtggaccagtggtacacaggttaggagagggggaagggcagagtttacattgcccgtatgctggcgagtgaagtccactaggaactgagacatgaacttgaggcttagcaaaagagagcgacttagagaaagagcacccgcactggtgactgtgggctgcatggtgaaggggggcaaagcagtgacagcgggagtgagcccctctcaaaaactgatgccaactacgcaggacagagagggggcggggaagggggagtgacctgagggagactggggctcaagaaaagcctttttgtgttggttgttttaaaggctggcgatactgtagcatgcttagttctaaggagaggaagggccattaaagacgtttgagaaggatcctagaaggattgtattttccaacggaggtggaaggggttgagatccacagcccaggggatatgctttgaaggaaggagaaaagcacctctccttccctaaaagaaggcaggaaaggtgtgtggacagaaattctagagagcatgaaatgcgggtaattgggctgcaataagaatccagtcatggttagagaacctgaatttaattaaggtcagtgtatgtctgtagagtgccattatcttacatagaaattatttttgaaaattttagttgacatttttgaatgatacctactagtactacagataatagaagcataaatatgcacaaaagcagttaaaacttaaccgttcgtcttaaagtaatttataactaatacttattgatgccctactctgtctcagtcaaaaagctaaacaccttccctatgcacaagaaaaacctatgcagtaggcgttactagttgtcctcattttatttttattttttattttttttcaaacttaaacatttttttttgtgtagagacagggtctacctttgtttcccaggctggtctccaactcctgggctcaagtgatcctcccgcctctgcctcccaaagtgctgggattacaggcatgaaccatagcacccaccctttatccccattttaaagatgacaaaacctaggctcaaagaacttaacatgttctagatcacgtggctagtaagtggtgacaccagaatttgaaccacgtatctgactccagagtggtggtgccagctgctgttctgtggattgagccatatgaaattgactatttagcaagagaaatataaaacatcggcatttttatatgtctctacctaatacacttcctcacctcaatcattgccaaggtcagtggactgcttacttggtgccaggcattgccctaagtgttttgattgccataatctgttgtaatattttgaaatatttgcagtcttaattgtcctgatttaaaaaatcatgtttttgaatatgataatatactttaaatgagtatgtttgattagcgatgttgctttttcctatgttggcaaaattatattttgaggaaacgattagaaatattggcaaaacatagagaaaaatcattacacatctagtgtctcacaacatgaatagttttttggggcatttttcacaacatctgattcattgagtggtagtcccccaagagatacctgtgaattggtttttaattcagtagatttctgttttattgtatatttgttgacttgtgatcaacatatattctcttctatttttgaagcttattttgggtaaaaagaaagattacctttctatcttctcactttatccccaacttatgaataccataggtatcaaccagtgatattactagcaaatcacccactctcccactttactaataaaatgttgtcttgaattcttgcatttccgctaaaaaaaatcccattcaaaattatgaatttagaaatgggatgaaagctgagtgcagtggctcaggcctataatcctggcaatttgaaaggctgaggtggggggatcaattgagccaagaatgtgagaccagcctgggcaatagtgagaccctgtcactaccaaaacataacaaaaattagcctggtgtggtggcatgtgcctgtggttccagctactagggagactgagatggaaggatcacttgagccccagaggttaagattgcagtgaattatgattgtgccactgcactccagcctgggtgacagcgagaccctgtttctattaaaaaaacacatggggtgatttccctctccccagtttggaagtcttcaataaaaggataaaaagatgtgaagcggttttagccatctctttttggcctccatgtaatcagattttgtgcttatttgagacacttaaaaagtatctggctaattgtgctctctgttttgaggacctgatcttaaactggatggtcttgatattttcgtgtaacttttagttcaggtacaagaattctttaaagaggcatggacaattaattacacgactgagaaaaataatttcccccaagttaattgcacaaattactgtagccctaaaaggttaatgattatcaaacatctttgatgcatagagcctattaaatgccagtatcatttgaataatttaactagagtagtcctttcacaaatgggtctcatccaaaggacaacagtaaatagtgcctttaaaaatattttctctttagagaaacgtgttcaaacccttcagctggagtcaatcttatgggtcacaacacattcttacatttcagaatataagacattaaaacattttatattttaaatgatttagatcatttattatccttatagaactactgaggttttacttgaagcttgtaagttaaatttttgtattttatacagagttagcttaggccgtgattaggtagaaataatgggcagttatcactgtatttatttgaaatgaaacttcttttacagctattcatggaagaaaactttaatattgtattaaagcttttattttatctttaaatgccaactttattatgtatttcttaaaattgatcttccagtattttttatgtatactttttagtgctttatagttattagcaggttccacagtagtaactgaaatatactctgattttcatttttattttataaaactttgatttttaataacatatgctgaaggacactctgaagagtactaatttttttcagggatgcttttccaaaaaggattctgtggttcaataaacttgggaaagactgcgtcctatatgcttttagaagagtcacagtgtatactcacatactgaaggatttgagaaatgctagagcaaataaatctaacgttgtctaacccagtgtttcccaagcttgtctgaagacagacatttccactcttgttttacatcataccctcgaacatcgaaggacttcgctgatttgtgttctacacaaccgtcttgagatacgctgttagattagctgtagcttcccttgccacatcgcgaatttccagcattcaaatgcagcaggcatgtttatctgctgcacttacacctacgtgtacatatgtatataaatataccagtatacatcaatatgtacatttgaagcgtatatgcacacttacataggtacacacatatatgtatgcttgtatttttattttacttactgcagtacccgtagtatatagcagatagtgaaatcagaaaataattgttgagtaaatggatgagagagtttcaccagtctgtggcatacgccctgctgccttcttcaggatgcagaaaaccctgtcccctggcttaaagtgtgacattctggagaaagtagatgtgctctctctagagacacctgaaacatcaaacacaaacagtttgtcagtactgtttcaatattaagtctgtcagagggaaaagaccctgaattttgggtcaggagacctgggttcaggtatggattctaccactttccactcacgtcatcttaggcaagttatgggctttttctgagcctcagtttttctcctctatgaattgataataccttgtaagactgttgaaatatctatagaagacatcaaaaacttatttttaaccaattggaaggtacgctgtgaatgtattatcctgatacaggtgaaagctttattaaaaaacaaatgtaacttaacatttccatttcatatatataggggaagaaaattcccattttttggtgaagatactaattttcataagtaatgaacataaaaaaatatatttttttactgttagcagacaataattttttttctactgtttaaaaacttccatcctttttttctaataaaaaaactccagaatcttcctggattagcctcagacccatcgcacctgctggtctctctgcctggaatcttctttaaaacaaggtgacttgccatttctttccatcttatttcagctctcagtcaacctctcacttccctgcccaccaaaatacagcccccgtatgtatctctttatccctttacctactttattttcctttataattcttatcagacattttattgcacatatcattagtgaggtgagatggagatcatattttgtggcgattagtaagggattgtaatatctctcaataacaaaattgctttagaccaaatttttgtttgcttatatgatttttacacccattatttcagcactttaatgactctgtcagatgtataggttagttagtagtcatacttctgtaaaattctctagtagaatcaaaatacatgtgctctccctttcctctgcatggattttttttttccacatgagggaagctgtggtaaataatgttatagattttcactcgttagtaatattactcaaataaacgatgggaaaatgtttctcttgacaggattgagtaggtagacataggaattcatggaaccacttatgttaaaattgataactttaaaaaaaattggatagcagaaataagacttgttttatgtattagcatccagccaaattatcataactgattgtgtagtgtaaggttagtgatacaaagatgtgcaagatttggttttatactttatctattagaagtttgggtttggtgatacttttaataccatgcagattgcagttttagctatcatgaatttctgaatattttatgtaaaacaaagatgttgcctttaaaagagttaaagttgaagttttttaggctagaatgtgatttagctttatatagctttttgtcagactcttggaatcatttcaaaacacactcatattttgtttagagttaacagagctgtctagaagtaatttctagtttctcctaggctactcatgatgtttgaattattttccgtattctctgctgagagattcttgtggaagtagactttctgagcttctataaacattttccttctggaactatgcccagtccacctgttcaccatttacagggaaatgctgctttcctaatgaaaatcaagcccagattttccagttcagcttctgtaggtagggagtgcagctgtactgggcagcctccagtgagtcccggggacttgacttcttgcaggttttctgctgatggcagctgctatcaccatgtttatcttttgggggactggatgctgctccttcttcaacgttttggcccaagagtagacaacatatgtcataactaacacaaggctgtcatgtttaaagacatctttactgaatgctgcagaggaataaagagaggaaaacccagagagctccatgaatcatgaattcaggcattctaactttagagctatggcacattcatcttcagttagttgagatggttgcttgcatgtaagtggcttttcacatttcaaaaatggtttcccaagtgagcatatgtttactcttggctgacacgcctctgaaccagccccaagttggtgtgcatggtgctagggcatgatttcaggcccgactcatacccccaagctagacacctttgtgcagagtacatctatatgtgtactagggattgcctactgaggtttttcctagttctccctttaccttcagaaggcatagagcacctttaatagccctcctgccttggccctcatcctccctccccaccaacccctgaattcctttagagattcctcatctcctcaaagtccagaggtgggctgtcttctcccacctccttgtaggagctcaccctgatgaaggttatttcatttctgaagctctgtctcctttttggcaactggcaccagcaaggatcagatccttctaaaactgtctcctgtttataacagaatctgacacttccaacatcatgtaagagctgcatatgccaatcacagtggagtttttaatcctgtacccaggtctgttgtgaggataaatggtaattcccattgcatttttgtgtgtgataaagtatattgcttaagagagttctggggatgtatagtggtgatgattacacaacgatgtgaatgtatgtagtatcactgaactgtacatttaatgtttaaggtggtaatcttttgttacctgtctattaccacaataaaaatggaaaaatatattgcttaataaaataatacttgataaagtccatgcagtgtttactacatgtcagtaccattttgaacattgtacacgttgcggtttacttaatcctcacaacaaccctgttaagtagctaatattataatccttatttgacacatgagaaaaatgtgctacatagaagttacataatttgctattaagtgagagaacgagattcaaaccaaagttgtttagctccatagctcatgctgtcaaccactatgttaatacaaatctgcattgtcctaattttattctatatttatgttcagatagaaggcactctgggaatctggagactggggttctcagttctggctctgtgactgcaccacatttgtgactgtgaccagagtagcttctctagtcttcagttattttagttataaaatgagatgggataaggttcactgttaaatttctatttataaatgctgtggatgtgtatatatttttatgtatgtaaagttctgaggttgaataagccttattttctctgtggtctaaaccatacctatggaatctcatctgtcaaacgctatgtgattgaagattaaaaaaaaaatctcatctgtcaaacgctatgtgattgaagattaaaaaaaaaaaaggaaaattttatttgaagagactgggtctcattttgttgcccagacttgagtgcagtggcaagatcatagctcattgtattctcaaactcctaggctcaagcgatccccccatcttagcttcccaaagaattgttattaaatctcatttagaaaagttgaatttctcaaatattaactttgatgatataatactcaccacataagtagtagttgtgtgtactttctagtttgaaacgtataagctgtttcgtgcattagtggagatgagatattaaaaattattccttgacatttttaagagttgataaagggagaattttataaagtatgatatatgtaactatattatattatgggatgcaattttaaatgagatttctgtcacactaagtcaacgtgtgtttatcgagtacctactgtgtcaggcacatgcttgatgctagagtatacagatgataaagagaaggtggcctgcccaaatggagtttacattccagtgggaaagctggtaatcaacaagtaaacaaatgagagaatacaattaatagcagccgtgatacctgctggaaaggaaatagcattatcctgtgatacagaatcactgatggggtcaactttttggtagcgtagtttggaaaggcctctcaggaaatgacattttaagtaaaagctgacagaaggaccacaaggaatgagtggtgggaggaataagggcagatgtaaaggagtggggggagaatagcattctagacaaatgtggaaggctaaataatgttaccccaatgatgtccaggttctaattcctagaaccagtgaatgttaccttcagtgataaaatgagactacagatatgattaagttaaagattttgagatggagagattatcctggattatctgggtgggctccaaatacaattacaagtgaccttataagagagaggaaacaggatatttaactaaagagaagacaactacgagacataaacagagcaaagcagagtcagagaaaatgctacacctctggtattgaagttggaggaatgggccatgagccaaggacaagggagtgtagctctaccatcaccttcactgtcattcctttagactcatattttggacttctggcctctaggactgtaagataataaaggtatgttattttaagccataggtctattgtagtttgttacagcagcaacagaaaactaatacaggataggtgtggtggctcaagtctgtagtccaagctactcaggaggctgaggcaggggaattgcttgagcctgggaggtagagggagcagtgagctgtgatcgtgccactgcactccacagcctgggcaacagaaataaacaaaaacaaaaaactaacgtggaagttggtacctggaggtggggtgctgtggtaacaaatatctgaaaatgtggaagcagctttagaagtggtgattgagtagaggcttgaaaaattttgaggtacatgattaaaaaaccccaggttgccttgaacagactgttcaagtgtttaatgtagatattaaagactgctggtgagggcttagaaggaaatgagcttgttattggtaagtgggggaaagtggatcattgttatatagtggcagaaactgtagctgaattgtgtcttagagctctacggaaagcagaatttgtaagtgatgaagttggctatttaggaggagatttccaagcaaattgttgaaggtactgcttggattcttcttgctgcttatagtaaaatgtgagaagaaattctaactgtggtctgcagcttcagcttcatgccggagggttccagggtgccctttctgacagcctgccctacaaactatactttgaatagcagggttgtagagaatcatatttattcatttagaatgtcaaatatatctctataaaagagtttagctttgctcatcagccttttaaatgtttaccactgacagtgacttcactgatctaattacagttatcgaagccaatattgtaagaactgtgcatcctcttattgtgcacaattgatctggaagcatctttcctataccgagttaaatagtgtcaccccagaaaagttattttcacctatgaatgtgagtttatttggaaattgggcttttgcagatgtaattaaataagatgaggtcatacaggattagaccggactataatccaatgactagtatccttatatgatgagggggctttggacatagggacacatagggagagtgccatgtgcagatagacgcagatattggagttatgctgccgaagtcaataatgccaagtattgttggaaccaccagaagctaggagagaggtggaacaaattctccctttgagccctcaggaaggaaccaaagctactgaaacttgatcttggacttctggcctccagagctgagagaataaatatctgttgttttaggacattcagtttgtggcattttgttatggtagccctaggaaatgaatatgtcttctgacaagtaaaagtaaaatagtggactctaacaaattaatttttaagcacccaacagaaaatgtcactcttccacagagccaatgtctatactatggctgttttccagttttggagttctggaagtttgttagctaccattgctctttgagtaattcttaaaccttttataccaggtcacatttagaatagaatataaaaaccttggacacaaaatcaaagttcataccagatcaagaggggacaaaaatggactagaaggaaggttacataaagtggtactatgtcttctgcaatttgtttgttttcttgtaatatttgccctgagctcaccagcgaaataatagatagactccatagaagtcaactcttaaaaatgacttttctgtcattctttacctccatcctatcaagcacacatgaccttggttccattgtgcaggacttaggaacacactttgaatgtaagcagtttcttctagcattgctggaagtaaaaggatgcctcatcttaaggaatagagttgtttctggaggtcttgcttaagcgtacatttggaagtgattttttttttcctttacgttttctgttgtagaataaaaaatttctttccacaaaggaattattatacccaaaatatgtttaaaaacaatttaaaagtatatatatgtacagtggcactggctttcagagaaaagaataaaagtatatacatgtatcctgttaactgatttttttttttttttttttgagacagggtcttgctctgtctcctgggttagagtgcagtggcatgatcatggctcactgcaacctccgcttgccaggtttaagtgatcctcctgtctcagcctcccgagtagctggtgtgtgccataatgcctggctaatttttgtatttttttgtagaggtgaggttttgctatgttgcccaggctggtctcaaactcctgagctcaagcaatgcacctgcgttgccctcccaaagtgatgggatcacaggtgtcaaccgccatgtttggccaacaactgaaatatttttaaaagtatgtatatcatgtaatatatatatatatatatatatgcatgctacctaagcttaaatgcaacaaagaccatacaaggcttttatggagacaaataaatgcacctgtgtaccacattcatgatagaaagtattagtattataaagatgcccatcatgtccacattaatccataaattcagttctaatcagtaactgaacgcttaaaacctttgcataacagacattttcaaactttacagaagtaaagagaaaagcatgatgaaccccatgtactctagcaaattccacttgtgaccaatgatttcttagaaatgtatcattattaacttatgagactttaaaatacacttgaggtatttaattcatgtcattcgtttttattgaaactcaaattgtcaaatctttgtccaattgtggtgcctttaagttggatcttgtgaccttttgacatgactccattagttttcttttatatatacttttatggtggtaaaatatatatacacacatatagcatagaatttgtcattttaaccatttaaaaagtgcagttcagtgacattcattgtattcagtgttgtatggccatcaccattatttatttccaaaacgtctttgtcatttcaaacagaaactgcaacttctaagcaataatttcccatttcttcctccctccaaccctggtaacttctaatctcctttttgtctttatgaatttgtctactctaggtatttatgtaaaatcatacaacacatatctttttttacctaacttatttaataattttattttcatgatgttttcaagattcattcatattatagcatgtaacagaacttaattccttttttggctgaataataatattccagtgtatgcgtatatcgcatttcgtgtattcattcatttgttgatggacacttgggttgttgcctccttttggctattgcaaatattgctcatgatgaacattggcttacaggtatctgtttgagtccctgttttaaatttttttttttttttttttcttttttgagatggagttttgctcttgttccccaggctgtagtacagtggcgtgatctcagctcactgcaatctccgcctcctaggttcaagcgattgtcctgtctcagtctcctgagtagctgagattacaggtgcctgccaccacgcctggctaattttttgtatttttagtagaggtggggtttcatcatgttggccagcctggtcttgaactcctgacctcaggtgatccacctacctcagcctcccacagtgctgggattacaggtataagccaccacacccggcccctattttcagttcttttggatgtatacccaggagtgaagttgttcaatcatatgataattctgtgtttagctttatgaggaaatgccaaaatgtttttcacagtggctgcaccattatactacttaacagaaatgtttgagagttccaacttttttacattcttgccaacatgttatttttaattttcctttcctatagctatgtgaagtggtatctgtacagaaatgttcattgcagcacagtcaagtgaaaaacaactcaagggaatatcgggaaagagtagataaaactggattattcgcagatcagaatactacgtagcagttaaaatgaatgggctacaagttaaaatgaatgtgattctgttgcattcttcagtacttcagttacatttttcaactccagaatttctgcttgattctttttaattatttcaatctctgttaaatttatctgatagtattctgaattttttctctgtgttttcttgaatttgagtttcttcaaaacagctattttgagttcttgaaaggtcatgtatatctgtttcttaaggattgttcactgttgtcttatttagttcagtttgtgaggtcgtgttttcccggatggtcttgatgcttgtggatgtttgtcagtatctgagctttaaagagttaggcatttattatagtgttcatcatttgggcttatttgtacccatccttcttgggaaggctttccagatattcaaaaggagttgggtaagccatatctgcattagggggcaccctaaggccagtaacactggttcttgcagacttctataggtactgtcttggtagtcttggataagatccagaagaactctctggattaccagacagagatattgttctcctccttttctcccaaacacatggagtcagtctctcctctacttctcccccgaccctcattttgagttaactttgtgtagggtctaagatcatctttttgcatgtggatatccaattgttctggttttatttggtgaacgtattatctattccctagtgtattgccttggcatgtttgttaaaaatcagtggataataaatataagaatttattgctggattcgtaattatgtgccattgatcaatgatttttattagtactataatgctttgatcactgtacctttatataagatttgaaatttagaaaagacctccagttttttttcaaaattgttttgattattctaaatgttttgcattttcatttgcattttaggacctgcttatcaatttctgtgggaataagcctcctggaatttgatagggattattttgaatgtatagatcaatttggggagaattgccattttaacaatattgagtctttcgatccataaatattgaatgtctcatcatttaaaaaaacttgaattttcttcaaagctttataatttttacagtacaagtcttgttcttatgttacctttatttgtatgtacttttttaatgctattgtgaatgtgtctcttaattttacttccagattgtttattgcttatagaaatataattgatttttatatattgatcttgtattatatcctgtgaactagatgtgctttttaaaaattagttctaatagtttttttgtggactctttggggttttctatatacaggatcatgtcatcttcaaacaaagacagttttaccactttctttacaaaccgaatgtcttttatttgtttttcttgggtggttagagcttccagtgctgtgctgaatagaggagatgagagtggacatctgtgccttttaccctgtcttagaggaaaagaatttggtctttcaccaatatgtattatattcactgtaggttttttgcacatgttaccaggttctattctaaggttgctgagactttttatcttgaatgcacattggattttgtcaaatgttttctctgtacctgttgagatgttcatttggtttttattctgtattaatatgatgcattactttaattgatttttagctgttaaaacctcacatttctggggtaattaaaaaagatggcttatcatctttttttatatgttgttgaatttggttcactaatattttattgaggatttttgcatctgtgtttgtgagagatactggtttgtagttttcctttctggtaataatttgtctcgctttgctatcagggtgttattgcatcccataatgagtgggaatattctagaatgagatgtgagtaatattcttaaatctacttcttatacttctcggaagaatttgtggagtattaatattatttcctccttcagtgtttgatgaaattccccagtgaaggaatctgagcctggacttttctttgtgggaacatattttaaaagctcatttaatttttgtacttgctgtagatgtattgagattttctattccttctttagtcagttttggtcattcgtgactttttaggaatttgtctatttaagttgttgaatttgttggcgtaaagttgttaatatttctttgtctttctaatctgtgaggggtcagtggtaatcatctctctttcattcctgatttttgtggttttctttctctctctctttgccaagggtttgccaattttgtttttaaagaaccaccttttaatttttcctctgttgtttttctgttttacatttctttaatttctcctgtcatctttattttcttcattctgttttcccttgatatggtttagtcttctgttttctacattttaaaggtgaattcttagattattgatttgagatttttttctttaatataggaatgttaacactatacgtttttttctaagtcttgtgttagctgcatctcatacacttggacatgagttgtatttctattattcagattaaaatacttgctcattcccccttgtaattttaaaaaaatttttctttgacccgtatttagaaataactgcattattgttggtaaatatactttatacgattttaatccttttaaatctgctaatgctttctttgtggtccagcatatgacttatcttgggttctatggcagcttgaaaagaatgattattttgctgctgttgtgtggagtgtgctttagatgtgtgttaaggtaagttgattggcagtgttataagtcttctgtatttttgttgatcttctgtctacttgttctattcattattgaaaattgaaatgttcaactattgtttctctttaattttgtcagttttagttttatgtattttggacccctgttactgcatacatatttataaattgttatctttacctgctgaattaccctcttattataaaatttccttttctttctagtaacaatttttgtctttaaattcattttgtctgatattaatatagctgtcctctgattactgttttcatgatatatcttttcccatccttttgttttcaactgatctgtatctttgtatctaatgtgaatctcttccagacagcatatggttgtcaagtttatttttctcagtctatactgttaatctgcaccttttgattagatggtctaattcatttatatttatttatatttaatgtaattattaagatttaagtataccttttcattatatgttttctataaatgttatatattttttgttccttcattcctccatgactgctttcttttgtgttaaatggattcttttcttaaatgcatcattcttgttgtttcttttagtatatattttgagttactttcttagtggttatcctggggatcataacaaataacttaaaattcagttcaggttaatcctggcataatttcaaacatacacagaattttttctcacttgcatgctttttttgccttataaattatgtatttatatgttataagcctatcaacaaagttttataattattgctttatacagttgccttttaaaacaaataggagaaaagcgttctcaaaaacaattatattgtattttatatttacctatttaattgcctttattggtactttcaaatttttttcatatggatttgaattacttcagctggaagtaatcctttagtgtttcttgtagagcaattctgctggtgacaaattctctcattttttctttatatgggaatattttaattttcgtttttgaaggatagttttgctggatatataatttttggttcgtagtcttttctttcccccccccagcgctttgaatatgtcacatcagtgccttctggtctttatggtttctaacaagaagtcagctgttaatcttatagaggattccctgtaatatgcaagtcattttttctgttgttttacagattctgtctttgaacattttgtcttaatgtgtgtttgactctttgagttaccctatttggagttcattgaacttcttggatatgtaatttaatgtttctcatcaaactagacatttttggctatcatttctgttgtagtgtttttgcggtttttaaaaatttgttcttagggtttttatctctgcttacattacccacctcttcttgcatgttttacacttttttccattagagcttttggcatattaatcatagttatgaatttctggtttgataattacataatctctgccatatatgagtctgattctgatgcttgctttgccccttcagattgtgtgttttcttgcctttcagcatgccttgtaattttttgtggaaagccaggcatgatgtactgagtagcaggaactgaagtagtaaataggtcttcagtgtgaggttttgtttatctggcttgtaggtttaacgttttctataactgtaggtttaacgttttctgtaactgtaggttttctgtagctgtaggtttttctgtaactgtaggtttcacaggctttagtttcccgtagtatccttgcttttttctcctttattttctttgggcttccctagaaataccgccttaagtagagtctgtaccttgcagctattttagttgtaatccactgttgttctattagagccctgttgatgtagtgataaggtgttgcggagaggaaacattctataatcttgtgataaacctcagatttgtttagtaggcctgagtccctgggctgtgaccttcagaagagtttcttagcatttttttttctcctcttctgtgagacagggatgctagaggggactgagttgtataatcaccttcccctaggtcacataaagttctgacaaagtagtttcccttgggagaaggcctttattatatagaacagaaggctccgggcatatttcaaaatacttttccccagatgcattttggcatgcttacttttccccttgcccttgctgagcacatgatttatttattattttatttttatttttatttatttatttttttaacctccagtcttcaccaggagaacatagtgggacttctgggggtaaaacttatgaaagtgtatgggtcccctaagactgagcccccagtagtttttttttttttttttcctcaagctagtttatactcagcctccagcaaatagtgagttaccacttaagtgttcctacagttatttcctctagtagcgctcctcctagtaagctgtgattttgtgtctccagttttcagtgcaactatttgccctgagacctcagttctctggtgtatctaagaattgtccatgttcaagttttccactatttttcatgttgggagagtgggacttccgagctctttacatgttgcaacagaaaccagcagtattatctcttcagttattctttctctcttcttttaggaccccagttatgtgtaacttcatgcacttggggatgtcccagaggtgccagagattcttttcatttttttttcataatttattcttttcctcagaccacataatctcaatgtatctttgaatttgctgggtcttttttctgctcatttttgtcagctgtggactccttacatgaatatttcctttcagttatcatacctttcaattccagagttttaattttgttcctttttgtgatgtctgtctctttcttgacattttttattttgtgagagttaaagaattaaaggaaagtatgagcatgatggtttcctttaaagtttacgtcttaagttcaacatctaggcttcatcagggacagcttctattgactccttttcctgtgtatggtctgtacattcctatatctttgcatgcttcatattttggttaaacactataaattttaaattatttaatgtgtaaactttggaagttcaaatttgttatccccccagagtatcatcctgttgataaggctgctgttacttcgtatagtgacttctctggactaatctcataaagtttattttcttcattgtgtggggacactgaaatctctgttgggtttgattagtggtcagttgatgattggacacaaatcccttttactaagtctcccatccttctgtgaggggctctgtatatgtgttgtgtatggctctttcctcggcttgtatatggcccggtacatgtgtgtggagttccagatacccactgtggacatctcatttcacaggtctcccatttaaatttttggctggactcttggctgcccaactggtatggccgacttaatagctgtggtgttaatcaattgcagctgattgtttttgacaaatgccctagggtagagggcttctcctgcttggtgagctctgcatgacatcaagtaatgataatgccttgtgaatggggcttccctgagagctgtgaagcaggtcagacagtgacagtgctccagagagggcgcttttggggaagtctgaactgggtctgctccctctggtggctacaggactacacattttcacattgttagggaggctgctggttcttagcctactgtgaatggagcttaggagagagggatggagtagaccaagttaaaatgccatgaaccaagcctttctagccaagattcagcagctttcctaagataatgctttagattgttgtacagctttggttaattttcagaattttcaaaaaagttgattttgaaaattgtggcagcattttcattgtttttatgcatgggagcgtttccacagatcttcactccaccattctgagagtgcccccaacttcgaatggatgaatttttataacaagtgaaaaagtaagtccctgaaggttacatacagcctttacccattttatcaacttagaaacaatgaaaagaacgtatgtacttataaatacataaaaatatacacagtatttgtattacacaaaaatagataaacataaaactataaaaagtaaagtacaggattctggatagtggttacctcagatggtggcagaccaaaggatgggagtgggggttacctagaaatatatgtgtcataattaaggtccagttttattttgtagttggtgggttcatggattcttatggcgtaattaaaaatatatacacaggcaaaaacattttatggttgtgtttgccttcatgttaacacatgagatgaggaatctattatgcaacagagctttataaaggagcttcaacctcagttttcaaagccattcttacggccagaggaattgcttatggagcttatctctacccagtctcgtgtaggtctgcctcagctggccgaactccagtgtcaggacaggacagtgatgatgagaagggaagggacagcagccagtgccagttcgagatgagtagtcatctaatactgcctctgcgtgggtccctgctgccatccgcagcctcatagccctcagctccgtaatgtgtcctgatggatttagaagatacatagggagctgtcattgtgagtctgaaaaatatacagatcacgcttcacttactaaaatccatacttgatgatgtcagccacttacacgagcattcaagaggtcttctagaataatcacatgacaagatttgggggaatacacagaattccaatcaagatgagttgagcataatatcatggaggcaggatcagaatggaaaggtaactgataacttggaagtttaaacaattacaattttcctgtttactgtgtgacaagagcattatggggccttgaaaatggcagtgtcaccactgggtaatatattttattcaaagactttttgagagagagcatctgtagagtcaaatggtacttgccaaactattccatgtatggaacccataggacttcataattttatggtttgctgggggaaaataacaagaccactcatggcccaggtgagtcttgaagaggctgtggccacaatatactgagccagccgtagttcactggatgggaagacccaagtttgacttccagatttacttcttacttgcactttgggcagttacattacttctctgagccttattttttttttttattatggagataatgctactgatgtgtaataattttgtatctactagtattagaatgtatgaattaccccttaatttttcaaatacttaaactgttaacatctgaatcttggccaaaatgagcacaaatggcatttgtataaatgcctagttattaaatgttatcactatttaactatctggatttgaagaccagtgcatggcgtttgctaggagtttatatcatgttcttacgtatgtgtgtagctgtctttactgcatctgtcgattaggaggtaagaacacctgctgaatatgtaccttgagctagctattgtgggagatataaaagaagcacaaaactggatcctgtcctcatggaactcaatctggtttctgaggtttagcttttatgtgactcacagatagagcaatgtcacagaaaataatatgcggaaaataaatgcaaaaagaacttgagaaagcttcatgtggctcagtatcctgcactcagtaggatatgtggaggatatatataaaatctaattgagattcttaggaaaggctttaatgaagactggagaatgaatgatatctgttataaaggatggtgaagcttggctattcagagagtaatggaggaggtacttcagtagtttttattgtgtctgcccaagaaattcactcggaagcacaatgtttatttctgaagaggcaaagaccaagttttagaaaataaagttctcctaaatactattataaagtttgagtatttctattatgattttatgacttcccatctgtggtaggtgttttattgaaattatttgaatgttatcaagctgtgacaacaatgctttaaaggtcatacacaaagcacaattaaatttcccaagtgaaataagaatgtgcattgtgaaaggcagagaatttcaagtagttcagttttgttgttgctttttttcatctgggccatttttgaggtgtttaaatcaaaaagttgtttttcttcttgattgcagttttcccttagttatttgtgtagcttaaaaatggaaaccaatgtgtttaagttgcaatatttttgagtctattagttaatataaactttattctacactcaacagtagattgcattatagctatgtggaatgtaaagattattttgcacttatataaatgtgatagcttctgattgatacagatttaattatgcaaactttggcttattatgaattagatgaaacatttctattcctctgtttctttctttctttctttttttgagacagagtttcactctggagtgcagtggtgctatctcggctcactgcaacctctgcctcccgggttcaagtgattctcctgcctcagccttcccagtagctgggattacagctgcatgccaccacacccagctaattttgtatttttagtagaaacagggtttctccgtgttgatcaggctggtcttgaactcctgacctcaggtgatctgcccgccttagcctcccaaagtgttgggattacaggtgtgagtcaccatgcctgacctatacttctgtttcttatgagcttacttattagaagatctctaagattcctgtaatttaaaattttgtaatttcatttcattttacccatttacatcattaaagtgatgaatggttgcttctttcaaatggtgggaaatgaattttggagaattgttagttattattgctcatttaaggttatttgaacgttttgactatttgatggtgttttttgtttgatttgtgatgctgactcataaataccatgaaaaacaggtctttttgttctaaccgaaagagggattatttagcagcttaatgactttggtaaataaaagtttatttgcacctatgagaaagatgacaggtaatatctagatatctgagtaaagagtaaagagagcacaaatacaataagatatggagactcagtatcctatcagctttttgatgtaaaatggtacagtagttactacctaagagaatagtctatttccatgctggttgctcacttgtgtgctcttctgaaagagtgagggcactgtgcgtctgactggatactggggtactctgtttccaagctgcattacagggatttgaaatatcttacatatatatatatatatatatatatatatatatatatatatatataatatatatatttatttatattatatatatatttatttattccatatacaggcataccttggagatattgcaggttagggtccagaccattgcaataaagtgaatcacacaaattttgtggtttcccagtgcatataaaagttgtgtttatgctattttgtagtctgttaagtgagcaatagcattatggctaacaagagtacataccttaattaaacattttctaaaaaatgcctgcacagagacgtgaagtgagctgatgctattggaaaaatggcatcaatagacttgctggacatgggctgccacaaacctccaaaatttgtaattttacaaattaaagccctcaatttgaaaaacataatatctgtgaagcacaagaaagctaagtgcagtaagacaaggtgtgcctatatatgtttctgtgtatatttaaataacttatattaatagctgcaaacagtagatttcttccggtgtatggctttgtcattgttatcactgatttgtaataatttacctcttttttgtatgttttattattttctgccatggttgataaacaagttaatttactctcagaacagagaatctgcagtattattattaatagtgactgttgacttcttttgtcatctaaacaacttgttagtctgcccttaggcttgacattatttttgttgtgaaagaatattcagtaaaaagttttgacatgtttaaaatcattaaatacttccaaactggtttggaaagcttctctgggctgaaagccagttgattcttatcagtctttttgcatgactgaagtcaattacttcagagcttgaacaactgcagccttggtaaatggtccagtactgtccagtagtacaatatgggaggcttttaaatgctactgtaattggtagtttaacagatgtgttttggttggacaagaatgtaaaagctattttggagcattttcaaaggcatgaagtttaaaataatgtaatgttaattttgtgctctgtaatgtatatcgtaagattgaggtcttaatgtttgtattaagtaagtgaaaatattcaaatgaaacttgtgtagaaaaggaactgcctgtgttcagaaagattctgaacaaaaacaagtgaattttcagaactgaactaacagttgccagagggtgtgggttctgacgatgtcctacctgaggcaggctttgtgactttggaaagccttggttttcttatttttaaagaggatctagtccaacactggtctactcagacttcctcatttgtaaaaaaaaaccaaaaaaaaaaacaaaaacaaaaacaaaaaacactttccttaatcttggaatgcttttcacaagaactaagtgtggcatattggtggctgtatgagtactctggtattataggagttgaagtgtgaggtggagagtaagagtaactgggggtaaaacttagacccaatgtgtccagaagattcagagccttatcactgcacaaaggagcacagattttaaacactgaagtgcccaagttgcatgcaaacaggctgtgggctgaccaccggtttttgtatttattctgaatatagtatgccacaaaatttgaatgtatatgcttttacagatctctgtgctctctctagctcccccaaaatctctgcctgtctttagtttcatgctagactgttttatctgtttgttgcctttgaaagcttttgggtttaccccatgctggagtaacatgtagatctagaaggattttgagcaggaggtagtgttatcagatatggttataaggaaagctcactttagcaatagagctgacacagtagtagcaggtagtgaattctgcaagagaattaatggacactagtcatcttgattgtacttagttatttactgcttcagtgtagttctgttgtgcttaattttcttttcttttctttctttcttttttttttttttttttgagagagtcttgctttgtcgcccaggctatagtgcagtggcatgttctcagctcactgcaacctctgcctcccaggttcaagtgattcttctgcatcagcctcctgagtaggtgggattacaggcatacctcactatgcccagctaatttttgtatttttagtggagacagggtttcgccatattgctcaggctggtctcaaactcctgacctcaagtgatccacctgccttggcctcccaaagtgctgggattacaggcgtgagccaccgctcctcgtctgttgtgcttaattttctaaacaaactctagaacaagttaagtggttaatccacgtgatttttgttctcatttaaaatcctatgcattcaaaatgtgaactccattaccatctctctgatccgcccttggcatagaatttggatgtgtatattacactggactcttggctttaaaaaccgtctatctgtatctgtgggaaagcttttcagatagcccagacaatataaatagccctagatttacccttaagtaacaaatgtgtttctttctgtggagttactcgttgtgtctgagggatcctccctgggttatttttttcctctccaatggactggcttggcatatgattgtcaagaacaggcactctggtcggacagaccttgtttaaatcttctctctctctccaactgtgggccagttcgttaatctacttgagctttggttagttattctatagatcgttttgtggattaagtgaaacatcatactgaaaacacttagttttatcatccagaccagggcactaaacgagaataaaccaacctcctagtttttggatgtgtttgacacgaggggatgtttaggggaaaataatatttgaccatcagactttttgaatgctggagaaagcatgcacaatgtccatgtaggaacatacccatatatacaggagacttaaacatgtgcgtgtatacatccatatacacaaaatgaatttaggaagttaattgaatcgaggagtttctattttataagataaatgtgaacagtacatttgtaatgtaagcagtctacttttttactcaaacaagcagaaaatatccttttttagttttaaactctttgtagacaagattgaataaactagagtggatgaggcacagagaattggttgccaatgggatcaagaatgctagaggaaagggcagagattatcctttcacccagaattgctctgtctctcccttactaggtaggaaaacaaacaaataacagagacaagggctactgctctgcactaatgatgcgtggggtgaaagaagtccttgcacactggctcctctttcctgcttcgttcacaacctattcagcactttctggaactttgcgtgaaaaatttcatagatcccagcaggaattttgtaaaacacataatctttgctcatagccattacccaatgttgtgttccttcaggggctgattgaaaacagagctttcacaaggtctcttgcatgatgctagccttcatggcatttgcatcctgccaagtgatacttctggtgaccatcctgccaagtgacacttttggtgacagtgccttggttgactggtctcagcaacctgctttaatctctgcaattaaaaggtatgaatgagtgaaccagtaaaatgaaggaaaaaatcaacatagtggcgggatacttacatccagaaatatgttatctaagggtgtgatactgggcagccagctttcatttaagaaattagacgtatttttaggaaaccagctttctgctagtgacctacattataaaatattataaactcccaagctggatactataaattgaagatgaagttctttcattttgcagttacacaatggaatattatgtgtcaggtactgttctaggcattgggtatacaaggataactaagaatttgtccttctcctcaaggagttcccacttttgtggcagagagggccttgaaaacaaatcatttaactgccacttactgagtgactagcacaggtgaggcatcctaccaggctctggagaaagagggaaatatagccctgctctcagcaaacacaggtggatgagaagggtataagcagggggctgggaagcagagagagagagaacctaaaaagacttaggcaaaggcgagtgtatgataaaatggagaacgccatagttcattctttcatttttttttttgaagtagagtcttgctgtcacccaggctggaatgcagtggtgcggtctcggcttactgccacatctgcctcccaggttcaagcaattcttgtgcctcagtctcctgagtagctgggactacagatatgtgccaccatgcctggccaattttttttttcataattttagtagagatggggtttcactatgttggccaggttgatcttgaactcctgacctcaagtgatatgcctgctgtggcctcccaaagtggctgggattacaggcagaagccatggtgcttggccagttcatcctttaattttggctctaataaattcactgtatgactaaaatgttactttttcttgatgttattattaatcctgtttaaaattagagcattggctttaattatttttaaatttagacactggttattatttctaaaggaagttataaacaaaatttcatacagcatgccatttgacaaattaatgaagaaatatttaatacatgtgagtatctcatttgttttgttattcaaggggattttagcttattgctttttgctttctgtatgttgaactgatattctttttgggcacctgtttgtataaacgtatcaatttgacctgtacttgaattaactgtttattttttatatgttggacagtactacaaattgctctatttatgaactgtatgtttttcttcaatatgcagtttggaatcctgctgttggaaccttatttgcttctgtatgctcacccttattcactaatgtttgataataatgcattataaaatagcagtgctacttctttatcaaaggcttgcagtatttatttagcatttgcagtttcgaaataattaaacaatgctgatgtacagttcttattgcatttcaaaaacctaaccagttaattagcttaagtggttctctcagccctattgacagttggagacacatagtgctggcttgtcaggctgctaaaatgaaacataagaatggcataactgtggttagcttcttttccccctcacccttgagatatgagttggctttcttttgtgtgagataaaaacaaaaccagatcatatgaactgacacttctgcttcagattaacatgagccttgttattcaatttcatgttggtgtttctacactcctttgcctcactgagatttcattaatcctcatatccttaatcgcctcccctttcccttatgatggtctgttttaagattctattatggttttttttttttttttggatgcctttgaggccatctgaacaatactcttggttaacctgagaatggattacaatctgatcacatacttactgctgtgtttgtgtctcgctgcctgtacagtcaggtggctgttctgcctcttcacccttggctgactttcacccatggactttgaagtgttactgcttctattttcatcaaattttatacaaattacaccgtttttccgcaaatgtacatttagtgaagtttgtttggctccagaatccagtccttttgcaggacaggagcagaggaaatggcagtgaaggagagggaagtccacgtaggaagaaatcccaagactggaggtggattggagacagcaacagaagagaagagcgttggggatggctctgagttgaagctaggtgactgttgacccagagaaagaagttgagaggagaaccacgctttgtatttaggtgggctgtggtggggtggaggggattgaggtgtggagtttgatttttgacattcttgtgtttgtgttggtaagacaccttgtggaactctcctagcagagtttaagcgaatgagcgtatatatttgatgaggtgtatatttgagagtgacagcacagaggtgatcataacaggagccactatttgttgagtgcatactagctacagtgataagtgcttcacagacatgctgtctgtgcttcaatgtcctcacctgtaaaagggatttaatagtaggattcttgtgagaatgaaatgaattgatatatataaagtccataacaatgtctggcacataataagtaatacttaagtgttatcataatcacattttaattcagtatccctttggaaagaggtattattgcaggttgaacatccctaatctgaaacattttgagcactgacatgacacctcaaagtggaaaattctacacctgacctcatttgatgggtcacagtcaaaacttcatttcgcgcacaacattattaaaaatatataaagttagcttcaggctgtgtgtaaggtgtttatgaaacaccttatgaattgaatttcatattagacctgtgtcccatcttcaagataccgcattatgtatatgcaaatattcaaaaatctgaaaatatcagaaatcaatcacttctggtttgagacgttttggacaaaggatactcaatttgtgtacacatcttatatgggggaagctgtgactggagcaatgtaactactctgccaaaggttgcataactcataagtggcaggtgaaatgatatctttttttttttttttttttttttttggagaaggagtcttgctctgtcgcctaggctggagtgcagtggcacgatctcagcttactgcaacctccgcctcccaggttcaagcagttctcttgcctcagccttctaagtagctggggttacaggcacacactaccatgcccaactaatttttgtattttcagtagagacaggctttcaccattttggccatgctggtctcgaactcctgacctcaggtgatccgcctgcctcggcctcccacggtgctgggattacatgtttgagctaccacgcccagcccaaaccatattcttaactctgcttgtctctcacctgcctttgtggaaataaacacctcaacagaggcttcatggtgtagaggaaagacaggacaaaatacctaacacacaaggaagctgttttgcttattaaatgaacaatatgcttttaaatcgtgtaagaagagctttgtaatgaaaatcatcattataagaaagaaaaacttacagaaaggtaggagtgaggcttggtatttgagctcctgcggaagaccaagagggagaagggaagatcagtgtagggcaaagcaaatccaagagagccgggaagataagaggaagaatcatgtagtttctgcatttacggacaaaagcgcttccaaaagtacataagggttgatgctatcaagtgctgcatggaggtcattgagagtgagaactaagaaaaggcagttggagtcacattttggtgttaaccagattaaatttccttttggagcaaaaacggttgactacacatacagttataagaatcaggaacatatgatccaataacatagatgaatcaggaactgaaatttggggtgtagatttattcctttgactttctctccctttttcagttcatgttttaccaatagagtattctggtagcagcactgtctgacatttgtcagcttaattagagatcagttacaaacttggctatcttatggatctgtgatacttcccagcaaatctgaaatgcaatacgggcactgacatgaaatgatgaaaaatatgctaattttaacctgaaaaagctccctattaatgcagcaatttctcttattcatactaattctcatttttttttctgcatcctttgtgtctagtctctccacaattgaaaagctgttttgaccaccacttaagagcaatagactataaattctggagtttaatttgtttaatgtctgtgagggcttgatggggttgggactttgttcactaggtatgaacccattgcctagaaatctgaagaagggtatattgcaggttcttacgggtattcctaggaagaagaaatgatttccaaacagaattagcatgtagaggagaaacgcacaaagaaaaggagatttgatttccacaatgtaaggaaatgtaaaatttcattagaagaaagggaaagaggacattgccagcaaagatggagagaaagaaggcgtgtttaaataagctggtttccaatttagctgaaacatttgaaagtaaacagaagtagagctagatttaggggtgtaagatgtgggcaattaatacatttatatggctcaaaatttgaagagttggaaagcatctacagtgaaaagccccttttcctgccccatttcctcagccactcaggctattccccagagtcactgtgcataattacatatataatacaaacatgtatactatttctcttccctcttttatttttccaaaatggtatcaaactgtatatattcttctgcaccttgccttttttctcactcaacatgtttcttggagctgactctcaagcagtttgtgactatgtaattaggacataggcagctcctgctttttttgttaaatggcactgcaaaatgttcctttatgtgtttataccataatttatttaaccagtctcttgttcatggacattataaccttttgctcttacgcagagtgctgcaaagtgagcagtcttttccacgtgtcatttcacacatgtgcaagtaaagctgtaggataaattcctagaatggctggattaaaaggcaggggcagttacgattttgaaagatgtagccaggtggccttctccataggttgcgagtgtatgaaagacttacttccaagccagtctcttctatgctgcctgctataactaccaattaggaatttatttgggctaataagtaacccatgcctggaagatttaaggaatgtgaccttcctaatgcatattatttttaatcactgtgctttcaacctaatgaccagttgagattaagccacgtggtacatatttattgcaaacctactatttggttctagggaatcagcaaggagcaaggtgttacttctctcttggagtttatattctggtaaataaacaagattattccagagagtgataaatactgtgaaaataatacacatgacaatataattgtaacttggcagggggcaggctaattagaaggagtatactggttatggaaggccccctgaggaagtgatatttcagctaaacctggatgatgtaaaggagccagaaatgtggaaatcttgggtggcagtagcaggaacaacaactgcgaagatcttgagccaagagtaggcctagtggttctagaaacaaacagtagggtagaatagcaaagggactatcatgagcagaggggagcagggcatagcctgaagctaaagaggggcaggggtcagaccaagtagatcctcactgtggtaaggagttgcaagatttcaaatatggatgtgatgttgagatttacttgttaaaaagataacttggagccaggtgcagtggctcacatctgtaatcccagcactttgggaggccaaggcaagtggatcacttgaggtcaagagtttgagaccagcctggccaacatagtgaaactccgtctctactaaaggcatgaaaattaggcatggcggtgggcacctgtaatcccagctactgggagggctgagacaggaggatcacttgaacccagggggcggtggttgccttgagctgagatcacaccactgcactccagggcaacagagcgaaacttcatctcaaacaaacaaataaataaataactaggaggctgtgcatggtggctcacacctgcactttgcgaggccatggtgggaggatcacttgaggccaggagtttgagacagccttggcaatgtagcaagatctgccatctctacaaaaaattaaaatatcagccagatgtggcacatgtttgtggtcccagctacttgggaggattgcttgagcccaggagttcaaagttgcagtgagcagtgattgcaccattgcacttaagcctgggtgatggatgagaccctatctctaaaaaataaaaagataacttgggctgctgagtggagaatggattgggagggggcaagggattaagtggagagagtatgttttgggctgggctgtagtggcagcagcagagatagctatgccttggaagacatatttttgcagaggtggaactgttaggatttgtatgccttatgggtgataggcagaaagaggaatcaaggactcctagaattttggcttgagcaagctaggcatagaggcaggaagagacaaggttggggtgcggaggaggaggagaaatttgaagggtcctagggcattttctgagacgagtggcctggagaatgtgacggaatggactgtttggcccagcccacggaggaggagagtgctgggttttagaaatggggcatctgagaaccctgacttctgtcatggtgcctggagtctaaagtggggagcagagcatccagcgaaggtgggtagtgtccgaaaatctggagaatgtttgtttctttggtatgttttagtttttttcttttacatgaatatctatagatcttccttgatcacaaaaaatgaagttggcaaatttatggaactgtgaaagtaataccttatgtttttgtgaaactttgagagataatttgtctactataaaatttatttaaaattgcacaattgtgatttttcacataatcgtaaggttgttcaaccatcaccactatcttgactgcagaacatttttatcaccccagaaagcaaccctgcgctcactagcaattcctcctactcctccattcccccagcccctggcaaccgctaatctacttgctgtattctggacatttttacaaatggagtcatataatgtgtgttttttttggtgtgattctcttctttcacttaaaataacattttaaagatgcatccatgttgtagcatgtgtcagatctccattcttgatggctgaaaaaatatttccgtgcacggatataccacattttattaatttatcagttgatgaacatgttggttgttttgacttttcggctattatgcataacactgctatgaacatttgtgtagcagtttttttgtggacacattttctttcttttggttatacacataggagtgtaattgctgggttttgttaacttgatttttatcttttgaggttgtatccaactttatatcatttatttatcacagtagctatgaaaggaacctgaagtactgaaggatttgatgggctagaggaaaaagtgcatatgttacaaaaaatatttaaaatgaggttcattcatgcattggttaaaatagggcagacctggacacataaatgtgtcaggagaagtaaacaaaacgtgtaatacttatatagtggaagagtgtattgcaggtgtatgtgtgtagagaagtgtgtagagaagttatatctatatgtaatctcaacagaggtagataaaaaacaatgagaggtaggttaaatgagaagtagattaaaaaacaacggtgaaaaatgattaaaaaacaatgatgagtgaataagtgagttgataccatttatgtaagttaagaaaaccacaaagtaatactatgtattgctcatagatggaaatgcccatatacacacacagaagtacaaaaaggattggaaggatacccacaagtccatgatagtagttgctttgtatccctacttctgagctgcaaacccatgccagttttccttaccatatatttatatataaattatatataaatgtatatatatatattcatatacaaatcatttctgttacatgactgtacatttcttcggagtagggactatgttttcttcaccaatttccattgcctagcacttaagtgtgaacacatatttttgaatgactaactgaatgaattaaatgattttgggaacaagatagggcaggactaatgaataagccactctcccccatcctgctcattgtctctgctccctaccttcatattctgttagtgttgtcataatatgaggcttgcaattaccagagcagttccatatgacacgacatgctaataaagcagatggtgtgtgcaaataagcaggataaaagaggtctttgctgcaaaagtcattgctgtctcctttaaagtatgaagtattttatgatttctcagtagattttatcttcattgtcaaggtaatgattatggatcgtataaatctttatggctttgttgtatcaagtgtcaaattacacagcttaggtagttgtagaaagaaagatgtctgtgatcagattaggaagtcatattactaaaagtttttgccgttcagggaggagttggtctcacttttttgtgttcagatagtggagaactgtgctcccgttctagggccctccctcctttctctttattaacttctccccacgggagaaagaatggcaaattggaaagctcggggcttgacattaatatgagtgaagtcactgtatttccacatggctttcgttctttttttttttttttttgcgggggaaacaaggggtggaggcctgcagaaaggtgccagctatcctctactttttgcctgctgtcttcaggcaataaggagattagggaggtgttcccctggcaggcctaatctggtctatacttcttctagtccagcctttgcctggacaggtaaatcagttcaggtttgctctgtgaacctggccaccttcaggtctggaagaagaacataggaagccctgctgacgtcaggcttaagctgtattctccagcacatttaccagaagcctctggggttgtgtgtgaccatgcctcgaataaagcccatgttctgatccccatctgtctgtcagatgttatttgtggatgttatttgtggttatgcccagttggttagaacctagaaagtgataaaagtgagccatgcagccgggcacggtggctcatgcctgtaatcccagcactttgggaggatgaggtggatggatcacctgaggtcaggagttcaagaccagtctggccaacatggtgaaacactgtctctactaaaaaatacaaaaattagctgggcatgatggcatgcgactgtaatcctagctaccgggaaggctgaggcaggagaatcccctgaacccaggaggtggaggttgcagggagccgagactgcgccactgcactcaagcctgggcaacaagagctaaactctgtataaaaacaaaaaataacaaaaaaactagcgagccctacagctgcaggctgaggttctagttttggcaataagctaaagtgtaaataattttacatttaaaactatggaacaaatagaggtgggacatgggctgcccctgcccacctctccagccagttccccgactcttcgtcttctttctgctgcatgtggtctgaccatcttagttctcaagtttgccaaactttttttcagccatgtgtcctttgcctatgctgttttctctgctaactttctcttttttttctctctcttacttgctgcttttatggtcaagttctaactcttcaagcgtacacttaaatagtaccttctctgaccccgtaggctaggttgattgcttcagtgtactaaggcaaaaataccctgagtatctgtgctcattaacctctgtgtttcccttttgtaagatttatcacaattgtaatcaaatatttatgctatgatatatttgttgcctttctagattttctaacagtcttctttgcattgttacataaagtgtttagtgcagagctgggcactcatatttggtgcctgagggagatttgttgagtgaataaaatagcagtgtccagcagcgacatagactgctgagatatggcatgtcagagtctgaaaggcttctgtccagttggcaagtggaattcattggatgttttacaaagaatagttttagtaaggtggtggggacggaagtgagtttgcaaagtatcttataaaaagctagacttaattactcatttacgcaacattggaacccttacaagtgatttctctactgagagcaacttttcttgagttttactaactcagtagacactgtcagaatctgccagattacaacaaaggggtaaaaattcctgatcacttgaggtcaggaattcaagaccagcctgggcaacaaggtgaaacccgatctctactaaaaatgaaaaaaaaaaaaaaaaaaaaaaatagctgagctgggtggtgcgtgcctgtaatcccagctacatgggaggctgaggcaggagaattgcttgagcccgggaggcggaggttgcagtgagccgagattgcgccattgcactccagcctgggcgacagagcgagactccatctcagaaacaaacaactcccaaggcattatactatgactcttttctcaatgggtagtgaacagaatggaatattcacttcactgcaaagagtcactggcaggtggtgcagagcactgtgctccagaaagagcaaagagcctagaggtttctgatctctgcttatcactcagccaaaagtacagtcatttgcttaaaaaaagacaggtggcataaaaaaaaaagtattctttaatctctctgctctacaggacttgaaacatagccttaaatgactaagtcttcacgtgagcatgacataacctggaaatcttcctataatggaactggccttgtgaaggtatttattgttaagactttccagggtatattttgggaggtgccatgggcagatacatcggcgatactgttacatagtccaggatgttctacttttgaaaattaacaataattacactcaagaccttaggcaagttgactattctcagcactttatatatacagtcgtccctcattgtacaccgggatctcccctacccctcgcctatggtcaaatctgcacgtactcagtcttacagtcagccctgaagaactcgtatatgtaaaaagagggtatctctaggcagtgaggtagctttctgttagctcttgtagggaccatgttcttgtggacttgacaaagaatgttatatcaaaagtcgtaactcctttttcctgatttaaagatgacatttacatggtttttgtgtcccatgaatacggtatttttgatctgcatttgattgaaatgcatttgagctgctcagttgaaacctgtgttgttcaagggtcagactgtattaacctatttaatctttgcagcaaatcctgtaaggaatcagtccttttacagaggaggaacctgaagctcacagagcttaaggactttgcccgaagtggcagaattggcatttgaacctaggcatcctggcttcagaatccatgttcttcccttttaggttatactgcgtctctgtggccacttgatgataaagtcagtaattaggatccactgttgttccctcttgtgcctctgcccttttgctcatgttctcctccctgacactagagcacctgctcccccttcacctgcagtgagtgtctcggggaaacatcagcacagaggctctgctttctcccacccggcaggtccgcagggggttgctgtttcgaaagtattgagtgctctggacaccatgatctgttctgtaggattcttctgtagcaggagctttgtcatggactcagttgccttttgaatgctggtcaggtatcctagtcatctttcacaatgtcgatcatatgggaaaatatgtttctagttctgacaactgaattacatgtacacctttggaacataatctgtttttaggttgagaactacctgtgtattcatcaagtactgaagttcccagtgttcaagaaatgccctatgctattaacagagaattaacaggtttctctaaagaacaaaactaagcttagtatggcctggtattaatccctgtctagaagtttcacaatcaaaagggcaaaatgtggaaaagcaaagataaataagtaaaattggaaaatacgcaaagccgttagagatgtaccagtggctcagaagtaggtaataatgagaaatgcacccaacctctgtgactgtgaaacatgccacccaagctttgggtttttgaaatctgtctctggcacttgaatctccttgtcagtggcaaactggagagctttccatacttctgtgcaaaggaaagcataccccagagcaaaaacaaaataaaatgctacttaatattcaatgtggtgtcctttgaatttaaaagttgtagtgatactattatagcagaattaacattattgtcatattagcattggaactttcccatttatttttggcttggtgaatttgaaagtgttgtttaacagaaaagattttaaaaggttagatgcaatagcatttattttgcacagtttgatggattgccagcagcagggaaaactacaactcagatcgtttcaacaactttctgttcttggatttttcctttctcaccaatttttctttcagagcaataatcattttactgtatatgaaagagatacctaaatatcaggtatctagttaggtgctaatgaactcctcctgcccattttttaattgtttgctttatcatagctctaagtagtcgtgctaatcttttagggggagggttaaggaaagattttacttaattttgggatttactttgtcttttacagagcttgatatgtggcttaacagtaagtaggattatagcaagttgttattttagagaaagtaaacgttatctcattatattcttttttaacataatgagaatctttatggaagaatttgcgacagctcaagaacattttttaaaatttaattttaagttccaggatacatgggcagggtgtgcagagtcgttacatagataaacatgtaccatggtggtttgctgcaccgattaacccatcaccaagtattaaaccccacatgcattagctatttatcctgatgctctctgtccttccacacctccctgataggccccagtgtgtgttgttcccctccctgtgtccatgtaagaacagttctttttaaaggttagtacttggattgttttattgttgtactgtttaagcagctttgttgagaaagagtaaattaaagcttttatcaatttttttttttttaacagcaaatctgtactctccttttttttttttttggtggcccaggctggagtgcagtggcgtgatcttgtctcactgcaacatttgcctcctgggttcaagtgattctcctgcctgagcctcctgagtagctgggactgcaagtgtgtgccaccacgcccagctaatttttgtaattttaatagagacagggtttcaccatgttggccaagctggtcttgaattcctgatctccagtgacccgcctgccctcctcggcctcccaaagtgctgggattacaggtgcaagccaccgagcctggcctgcactctcacttctagttatcaatgttaaatttatcatttgtcactaaataattatgatattcataattaccaaagccttttaaaactgcatttttataatttttgctacttgctgatagaagaccttttgacttaaatatctaagttttagattgacattagttttgatatataaggtttagttttcagtattgagctgctatctgtaaactaattatattttgaagtgaaattagtggagaatggacattttctacattgcgtgagcgtctacagctagagagtatctctaggcagtgaggtagctttctgttggctcttagatgggatcacattctttgggcttgacagtggatgttatgtcaaaagtcataactcctctgatttagagatgacatttagagtactgtaggtttatgagaacctgctcttaaccttaaataacagagctgctgccagggctgctgccttccttcctggtttttgggtgcttgagactcttggaaagtgggccagatgcagtggctcctatctgtaatcccagcacttctggaggcttaggcgggcatatagcttcagtccaggagttgtgagattcttggaaatgtaaagcatagttgatgagagggggaattaaatagcagaccggatggttctcaaaataaaataggaaattagaagatatgaggccttaataacaacaacagcaaaaatgagatgtatctatctataatgagatttctgaatgtcataatacagagacaattctgtatccaattagaataaaacttgttaccttcaagtggaatgaatcaaatgcaataattctatacccagccaaactactcttacataggtggtcagaggatcaatatttaaaaacctgctattattctaactttgaatcctttcaggaaaaaaaaaatttagaaaatacttaaggcattggtgaagtcaagagtgaaaacctcataggaaagaatatgtggcttatatgcaaccgattaacttgagtcaaatctaaataaatgttagtaggttgtgaagctaagtggattcattgacatgaaaaatactatagaatataaccaacttttcttaatactggaagtccttttgaaaaatcaaattattgctgggtgtggtggctcatgcctgtaaccctagtaacttgggaggctgagggaggaggattgcttgagctcagaagttcgagaccagcctgggcaacatagcaagaccccatcacacacacccagaaaacatcaaattatttctttctgtagctctgagtttatatgcatatctaatgaaatgattgaaaaccctactctggcaacacaggagttgggctggcgataaaaggtgggggaaaagcaggagtacttaggatgtgggagaggaaatgatacaaatatgatagactgttaattcctgggaaaaataccagaaacagctgatctgattttcagaagtaatcataaaaatagatagcatttattgaatgttgcaaggcctttgctaagtacttaatattgttacctcattttaccctgtatatcagagatattaatgagctggctaatttatatacctgtagaatgtgtaatgaacactcattagcattatagatatgttagttttaaagtgtatctgtgtccttttaaaatatttccttttaactcttaaattgaaaagtctagggaataatcctaatcaagaaggagttgcaggaaactattgtaaatccaggttgtaaagagaaaataaattggttggtgagaactgtcaccttttccataagataatttaagcacaaatgattacaacaatttacgttttttattgtggccaatatagttgacttggtttaaatcagacaggagaaaagaggaaaatttttattgattaaccaggccctgaattttctgtcttaggaggaggaaattatgtagttaaattgtatgattcctgtcaaaagaacaatgaacttttgagcagattggctgagcagagagaatacaaagcagggctaatgattgtcttcatcaaagagaacttcttgggataagcagatttctatgcttttataagatagatttttttgggggcagtgagaatataaaaacaaattcgggaatgagaggttaatcgataaagaacctgagttgtgttttagtcatggaaacagtggcttttttttttttcagttttgtttttgataaaaagtatcctaaatataaaggaggtatatttccaggtaggactgtgctatgtaactcagtagtctctaaactgattttagttttgcttttgatatctgaatggattaggaaaattccttccaagaaaccagagaccagaagatcagacaaataccatatcagtttctctgctttgaaaattataattcaaccttgtaaaatttttctaacgttgtgttctctgtaaataacacagagtaaaaataagtcaaaccatttgttttttcctctaaatgttctgaacattaaacaaatggttcttggcaaacacatactattttttttttttttttgagatgagtctctattgcccaggctggagtgcagtggtacaatcttgactcactgcaacctccgccttccaggttcaagcgatcctcctacctcaaactcccaaatagttcggactacaggtgcgcgccaccatgcctagctaatttttgtatttttagtagagatggggtttcaccatgtttgccaggctggtctcaaactcgtgacctcaggtgatctgcctgccttggcctgcctaagtgctgggattataggcgtgagccaccatgcccggccatactaatttaattttaggaatgttgtattatagttcattttgaacaaattgtaagaagattattttgtgcccatatgtgtgataatcagaatagcttgatgtagatatttggtatctttttagaataattatgtttagataaatcttttctgtggaaacatattcctaaacatttaagcctagttataccaccctcaaatataagaagtttatgaactttgtgggctgattcaggaaatcttttcacactgataaaaacaggagactttaatattattttgggaagaaaaatgagaaatttgaagatatgtctcttatgaatcttgctgcatcagtttgttttctgctgatagtctggttgatgcacaatttagttttcaaagaatttctcttcaaaaataccggctaggcacagtgttcacaccggtaatcccagcactttgggaggcagaggtaggaggatcgcttgaggccgggagttcgagaccagcctgaacaatgtaaggagactctatctctacaaaaaataaaaaaactagccaggcatggtggcgtgcacctgtagtcctagctgcttgggagactgaggcatgaggatcccttgagcccaggaagtcaaggctgcagtgagctatgatagcactactgcactccagccttggtgacagagcaagaccctgtctcaaaaaacaaatatttttcatccttggaaaaataaaacctaaaataagaagagcagcacaatatttttcttttttttgaagtagcagggctgaccaaagccatttctagccaaataaattatttattaatcaatatcgttaccacattctctatgtggaaaaagtattcaaatcttgaggcctatgttttttcaaacttgagagtcatacagttgccagcttttttttttttttttaagtagtagacaaattgtaagaactacaaaactgaaaattaccttctgtttttcttccccataagctgctgttgaagtgaagtgagctcagggagacaggcctgttgttatcttcctatggcactgatttacacttttacagaagggaaatttatggcccttatctgttgaggacttttatgaatgactggtataaatcaagaattgaatgaatatttttccctttaagcataaatctgtgattgggagattgatttctgagtaactctttggtaacccatttaaattgtcatcttccaattttctgtattttggcataaactgaataactaaaatataacttaataccagcatgatagatttgtttttcttctgttagatactttagaattcatctagacttctcacagacctcgataaataactcagcagtcagaatggaaaacaaatttatatagtggaaatctcattaatgggaatgaacaatacaactgtattcaaggtttaggcaggagaaggaaaatgatagaaatgtatttgtttaattttaaagattcttatgataaaatgatcattaattagggaagataagtagaaaaagacagtcctttctgggacatttgaagactaacagccttttattgaaagtcctggaaaagtatgtgtaaaaagccagccatgatgatcttttacctacacttccttaggagactttccctcagcaagatgtgtctttctaaaaacaaaagataagagacaataggagcccacataggatggaaagctagaaatcaggtgggttaaaaataatttcatctacactatcttccccttctcaaaagatttttaatctgtaaatggcaacttatacatggaaggattataaaatacataaaattactttttatttgtcttctcagatatatggcgtgttctttatcttccccttgttccaagtaattttgttaagcagtaaacaacgtggaagacaggttggtcaggagataagcagttgattccgtgttttttgaagagaacttttatgatagtaggaagaggagggcagtgctggtcctgtagtgcagtcgtgtagtactgtttgctgtgggacaagaggaaggaacagactggcaggaagggactgcagcatggaagggtgctaagtgcgtcactgagtgataagggtgctaagtgcaggaaggcccactggatgggcagggtgagagtgggttcaggttgtaggtgtggagttggacaggctggccttgttctagcagcaccatttactagctgtgccaccctaggcaagtcaccttctctgctcctcatttcccttctctctaaatggtgataataagagaagctaccctctgaagttgttaggattaactgagctgatacatagatgtaaaacccataggacagtacctagcacgttgcatccaacaagtgtcagcaaaatattagcctagccagtcacctgtggccattatcaacatctgtctccagttagtcaccacctttggtcaattctgcatttgaatatttcttaaagatgatttatcttctctgccctcatggccatagccttagtgtacagactttttaactctcaaataaattaattccgtttattcttttagtcaaattttactaaaatccattgtgcagaaaatgacctgttaattttctaaaatgcagatcttgccctgccactctgcttaaatccctgtcatggttttctgtcatccttaaggaatttataattaactttcagcattaaaggcatgcagagttcttcaaaagttagctcttgcttgccttccaacctcatctctcatcagatactttatgaacatcatatattctaattcttactatacctttccaaaaggcagtcctcattttgcacagtgatgcaggactgtaacagtgatggttcaagctgaactacacacaacaatcttaataacagtgggagcaactccagtattcccatgacctttgaatgtttttgttaaaacattaaaaattctctgtcagtgataaatatgtatggaaatgaaaaagtaaaactggtattgatgtagtatactgtaatgtaaaacattagatgaaaggctcacacctgtaatcccacactttgggaggccgagacagacggattgcctgaggtcaggagttcgagaccagcctggccaacatgatgaaaccctgtctgtactaaaaatgcaaaaattggctgggtgtggtggcgggcacctgtaaatccagctacttgggaggctggagcaggagaatcacttgaacctgggagagggaggttgcagtgagctgagattgtgccattggactgcagcctgggtgagaagagcgaagctccatctcccaaaaaaaaaaaaaaaaaaatcagaagaattgagaattaaaaacttatcaggagtagtttgaacagtgcttgtcttcttcatcttgtcatacgatataagatgggcctagcatcttttctatgacttggtgaatttccatactcctttctaagtttggatcagtttcccgtatttcatcctttgtgctttcagtgagtttcattaatgtgaagtttttttgctggcatcacttcctctgggacgtctttattcttttgctaatttatgtgaagctgccttcaccaagctcctgtggctgcacatcattgtctcttagatgtcgttagtgtctcttagatgtcgttagtgtctcttagatgtcgttagtgtctcttagatgtcgttagtgtctcttagatgtcattcccatagtcagctatttcttctctaaacgtcgtttatgtttgattcagatttcactttgagtttaccagtgtttcagtgctgtactttcatctttgctgcccaattccctctttggattacccatttttgtaaaatgtcaagtgggttaatcactgtgagacatggtggcagcacaactatatgcttttctgtctgtgtaccaactcagatgcacagtgaccaatcactgacaggctttgaaagaagtgacgtgattggtcatggatcatgatacagatctgttatttactcagtgattggtgcactgaatagctagtggtgaagtttcttttatgtaattattattgattaatttatcatagtaactgacatttgagtcttattattggcagaatgatgttaattaaactgtggtaactgaaatttatgcatctcagaactgtgcaaagcaaggactgcgagtatgttataaccatttcacaaagtcttaaaggttaaatggctacatacagcacatggccaaaaagtggcagaattacattaacataacttttcaaatatctttgatatttatgttataaggaggcacaatctgtctcttaatgcttctgtcaaattaaatactcatggagttcaaatacaaatggattgtcttcagaaaaaaattattagcatgtgtatttaggtccatagccctataggaactctgtctgtgcttagcttgggctaaccatgtaagactgccaagatttgcataaaaatccaattattgtaaagagctactcaaagctagcaacatacctgaccttatctgaggttattttttggaatgaatcaagagtccccagccttggagtgatgaaaagaccatcatttttatttgttttattctggaacaaataaaaaatccctggaaaggaaaggaacatcccgtagtcaagtggagaaaactggtctaaatagttagcagtggagatattgagatactctgcttaggatgagagatcagcagcagtgggtagggatgttaatgactggaccttaagcttcagggattcagaaataagttcagttagttctcttaggaataagttaaatagtgtctgctcaattcatctggccggctggtagtcagagtccacagtaagtagtcaaatttgaaagttgtaagatacaatccagcttctgcaataatgagaaggctcagtttggagcatctaaaattgttcagggtacaagagaactgagatacacagatggactaaaataatactcagttgtggatagatgaaggctgagaaaaaatatgataaaaggctttttttaagtgcctctaaaatgccaggtcttctagattacttttacttatttgtaatgtaattcttataaacatcttgttagcaggtgttatagttgttatttagaacttttctgagattatagagctagtaagtaatagagttgggttttttgttgtttttaatccaggcccttttaaatatataactcctaaatgaaagataccagacccaaacattatgaaaagaaggatatttggggagtgcatctctcatttttgatcttgcatgttgtgttgtatggaccttggaatgtaattttctgtagaaatatttgaaaatgtaatttgatacccagtccacactgcaaaagcctatttttttttttttttgtcagggtcttgctctatcacccaggctgtagtgcagtggcacaatctcagtttactgcagcttcagcctcctgggctcaagcaatcctcccgcctcagcctcctgagtagctgggattacaggtgtgggacaccatgtctggctttttttttttttgtagagacaggtctcactatgttgcccaggctggtgttaagccctgggttcaagcagtcctcctgctttggcctcccaatgagttgggattacaggcatgagccaccatgacagatatagagacacatatggagacacatagagatgtgcatgtaaaataggcccaaaagcctatccgtatgtgtctctctatctgtatatacatttctttctgtgctatttaaaatacatgcagtcactgtgtgacatattacatttcaagtgccaacttgggaatggtggaactctgcctctcaccttgaggacagcccttctttgcagcacagtcaatgactaggaggacagtaggcctgtgtttacatctgtgcaagaatggcatctgccttcatctccgcatgctcctagagaaggagccgtttcagcgagtcacttctcaggtattctaaatttggtaataaaaggacttgatgcactccaggtgcagtttctctgaccatatcaatgttcttaatttttttttgaggggaggggactgtgtcctaattagtaattaaggttattttgatagcaagtgttagaaaaatgctaattccaagactacaagcgtatttcacattctgaaatccaggtatcctaagggaccatggactggaactccactagatactactcagaagcttcgtccgcctcatctgtctctacttttacctctgtgacctagaggtcacttgaaacaagcttcctcctgctcgtcagcttcattcctctctttctgatgactgtctttctctagccatctgagcctcctgtcctatgtgacagtctcagctcatgactttccatcccctcagtttcaagagtgtgtctgagacctgattccagaatcccaaaaggcagaatgacattgactgacccaactggagttcgttaggtatccgtggcttgttaggaatctatctctagtaggaatgtctgctgccctgggggccgaatcctgcctgtgcatgacctgctagggcccatgcctccggtggatggaatgaagcaaggatgggggctgcctgcagagctgtgtcactcacttgtattcagctttcctgcctctggctctctgtcttttacctttttttgttcgtttgtgttttgagatggaatctcgctctgttgctcaggatggagtgcagtggctagatcttggcttactgcaacctccgcctctcgggttcaagtgattcttctgcctcagcctcctgaatagctgagactacaggcacatgctgccacgcctggctaatttttttatttttcatagagacagggtttcaccatgttggccaggttggtctcaaactcctgagctcaagtgatccgcttgcctcagcgtcccaaagtgctgggattacaggcgtgaggcaccacgcctggccttttatcacttttaaactaagaaaacaatgatcaccatacatgctctgcttccaaactatactttcacatccaaagtacccccagatcataaagtgccaccaaagagctgtgatatgaagaaagaccccgggtagaatcactctgaaaatgtgggaggtttttttttttttttttttttttaaagcaaattcattttacttagccagaatcctaatagcctgctgatttttgtagatgattactctgaaaacatatgcattggtgtggtctatgagtaaggctctgccttttaagtcacattctttgctgcttcattgcaatgaaaaataccaaaggtgaataccaaatcaattttttttagtattgtacttgtaaagacagtccatgaagtggtgagtgggagaatcaaacttttgtggtaatcttttattgtaatctactttcagctcagagaagcagcatagcctggtggactaagggaggatggggagtttggagctctgagatatgaactgttttgcaatgactagttttgtgaccttgagaaaggaccttaacctctgtctatgtcttcatatgtaaaatgggatctacctgatagaaacataggtgcattcatatgtgagcaaactgaataattagatctcacataaatcaggagtgattttttttttaaatggctgaagcctgcggtttataaaaagattctccctagaattcctttaagacctaaccttttctcaggggtgtttaaactgtgattaacaaatgttaaattatacatcccagtttacaaaatatacccgttgaatagagtgagactaacatgactttttgtctcataaaattatgacaataactcagtcagtctgtgtgaaatactttgtaaacagagctttgcaggctgcagtaaaaaaaaaaaaatatatatatgtattttatatttaaaaaatatatatttttatatatatatatatccccatacctgaagattttggggtgaactttttccaggttaagaatgacattagtgccaactgtgctgtattttggctatcgtgatgacattagtatcatcaaattggtcgtggcattgggacactggcagcatgtcatcctgccccagtcaagaatgactgtaggcagtttcagtttatctgttgctactagaattttgatgtagcagtgtcaaaaggttgatttgtactatggcaatcttattcctagatgtgaattctccagggggcaaaatatcctaaaagctaacatgtaaacaagctcaaaggattaatgtagtaggaagaaatagtagtttgttatatattcatgttgaatttaggtaactattttagttatttaaaagattactaccgaagggaagaaacatattttgctaggtttcgcatagaaaaacctgtgtctggctcaaggtaatacttgaattttaataggaacctaggtttgctgtcttcccagtgtagactgtagcctgcactgtcatagaagagtgttgattgatccggttgtgaaatagatggatacccacatttaagttgcttttgaaagagtcagtttccctccacaaatatggcaacaaaattcttttataatccacaaatagaatttttcttcatctgaaagagatttctcctaaaccagcctgaaaaattgcttttctaggaagaatttcatggctgagcctcattcttgtacagattcatagcatgttattactaacttgtaaatattcacttacagaagagagtgactagaatctttgaattcttttatattggtgttgaggtttctatccaagttacgcagtttttcattcattttagaggaagattttctcaaacaaggattcttcgtggttgcaaaacctatccccagagattccagtcaacataattcaagttgaccagtggattctaagtgtgacagtacggtgtttagcaagtccaagtgaaaccagatggaggtcagagaatatgcctggcttcgtccacattatctagttatctgcctcaaccctctagtttcaaccagcttcaagtgaatgttaaaccagactgctgtaatctacacatgctttcacacttcaaaaggtgtgtgttagttgatatttggtttagtcatttcgtctcttgagaggaggggttgaagtttttatttccagtagtattttattttattttattggatgaagttgtttttatttcttttctccagaagaggtaaggaaggttcctggattattgtatttggttggtaaactctcctctttttctctttctgtgtctgcatctcctcctttttctctttccctatttcttcttcctcttccttaggtttatatgaaatagaaacaattttctagcacaatgactaagtgaattgctacattaaagactggctggccaagaaatggttaatctttgtatggcaggctttagggaccaacatcaaatacaaacatgttggaaatctttttgtcattccagctcaattgattcagaaaaattttaagagcaatagtcagtgcttggaggaaaaaagaatactattgtaaatttgagacgttctcatcttgaacatggctcttgtaaatcacaagcttgacaaccttacagagtacatacaagccgtggttgacttcagaaatatgtgttttagacacagttttacatgaaagtcatgatattgtaaatataatgatttattaataagtttaacttttgttaggatactttgcgcataactaccgcaatgcattaagaaggaagtgttaagaattttcatcccacagatctgatgatttaaagtagtgttccatttgtgcagtcaatagaaggaggtgcaacaatgaaacagaaacaaggcaaaatctatccatatgggctcatcttatgacctgttcttgctggtaattttggcgtattttgtgatgatttttttttcctctctttttgaaggctcagtagctgtactactcactctaccaggccaaagagtcagcgtgatggagagaagattaggaaatcatgttttaaaattcttctaatgcagatgaatatgtcaacatgatttttctttcatcaggagcctgtaagagaatttccaccttgttcgccttggttttggtatatgaggtggactttttacttaggtgtcctccctgttgttttgaggctatgtgccctacgccactgtggtttaccctgaggaagtttgcgtagctcgcgtgccaaccacttctcttggagaagacggagtgtcataactacagctaacatttattaaggatcttgcatgtttttcattttaatcctcacagctccttaagtattatctccattttgtagatgggacatctctggctcaggctcaaagatgttaagtagctcacctaaggtcattttgccagctaagtaaccaagctggggtttcagcccaagccaactttaccgagtgtggatggttttaaccagttctctcgatttgcctccctgtgaggtgtgagttgttgccatcattaacccaggcctatctgcttttggggttcagagttggaaccatctgcagggagtgtagatagaatcatggggggggacagagcacaccctagtggagcctgccaagactcctcattgagcccagaaaactgagatacaggttagaattggccatttcatcgcagtgtttatttcatgttttctcatctcacaggtgagttttctagaggaaagatgatgaagtaaaattttacaacaatttttgaatacttttcctaactgtcaaatctccgtctggatcccattaataagatacaaagttatatcccaaaagtaccaaattatgtaattctttttctgattagttcattgcaacttgttcagcttcaaataaattaaagatttcttagttattgtgattcttaataattttgcaaaagtctctgtatttttttttttgaaatctttttctcattatttatggaagatagtgattgggagaaagcaaaatattaggcattaaaacagattatactggagagatctattccagtgtgatcaccaaatccacctattttgatacttgacttatgaaggggactgcctttttttttttttttttttttttttttgagacggagtcttgctttgttgcccaggctggagtgcagtgacttgatctcagctcactgcaacctctgcctcccgggttcaagcaattatcctgcctcaggctcctgagtagctgggactacaggcacagacagtcacgcccagctaattattatgattatgattatgattattattattattattttgtattttagtagagacggggtttcaccgtgttgtccaggctggtttcgaactcctgagctcaggcaatccgcccgcttcggcctcccaaagtgctgggattacaggagtgagccactgcactctgtgggggcttttaaagaggaagtgaagggtaactcatctctatcctactttacatgccccacctaagtccaactcccactgcctgtcttctaagggacatcttgtggcttgttctctgctctgctcgtattcagtctctacgtccctcatgctttctcatggatttacaatgattacttactctcaaacttatatttccagccctaacctctccagtgatcatttgttaacaagattgtgttaaaggaagcaacaaaggttcttctattggatgtagttgaaaaagcagaactgttgctctggcctaaacattaactttggagaggtttaaattctgtttagaagttataaatgagcttaatatcatgtgatttgcatgataagttattttaaagagtttaaatccatgattgttcaaaataggttgttttattttcaatataatatggttcttaattgtaacattaatgaacactgaagacatttttaagattcatttatgtaaagtgatttgatgaagtaagctgacatttgatggacttagtggaagtttagacccaatttgcatttcagtggtattttatggctgactttagaaaactttttagataggatttctcggtaaattaaaggatttagagggatgattacgaaataattgattaaaaagtgtgcaatattggttttcattgaacttaagcttgtatgggttcaatttaaaacctaattcaatacattttagattttatatttccctgaacctcttctgctgtattaattttgtcatgcttgtcattctaatctaatgatgatttaatgtttgcaaacctgaataaatctgtatgcaaggagttttgctgtgtttttaatcaatgaagattgaaatttggcaactgaggtgataaaaaatgaaaaattttaaatagaaaatgaaaataatgattatactttagaaagtactcttattaatgttcttggctatgaaccatgtaatatttttctcttatttttatcgtgtaatattttgaaggtgactgaaccttaaaagaagtaattgccactaaatcgtgaagaatgtttaaattagaacagattctttgtcctcactgtcttcccctttccctgaaatctgtagtctagagttgtgaataagagccagaagaatgttaaactgccttttaaaaactcgtctaccctccccaagaacctacatagacaatagaatgttctgtaatgaaagtgtatctttacctcattatttatttattttattgagcaaaaaatgtagaacatagaatgtctaacggattagtcacaataaaaaaaatttcctgggttatatatgtaaggggcagcggctgctcctctatcagtccaggagagcctggtctgatttcacattgcttttctttccacatgatctcatgacactaaaagacgattaatacatcctttaaaaatcaatacgggacattttactgtagtccttcacctttattgttcagtacccttcaggggtgaaaggagatattccaatgcaaaaaatatgtctgaaaacctgagtggtaagtaataaaagtttttttttctcttaaaaagtcttataacattgttatttcccagatttgaggggtgggccttggggtggaattaaaaaatcagtgtaatcatttgtaaggacaaaatgcgagtttctataaagaatgttttagcataatgtcactaatgttttgcagtgtgtagagagcaaactttaaaaaaagatgtgaaaatttacaaaccagtaatcctctatttcatgtgccagcagtcaaaattacgtgtgatcggctgggtgcagtggctcacacttgtaatctcagagctttgggaagctgaggtgggaagattgcttgaggtcaggagtttgagatcagcctgggcaacagcaagaccccttctctacaaaaaataaagttagctggatgtgatggtgcgcgcctgtagtcccacctatttcagggggcagggctaggagtttcaggtttcagtgagctgtgatcgtgccactgcactccagcctgggtgacagagtcggatcctgtctctgccaaaaaattaataatactaaaaaaattagatatgattaaggataccaaaaaattattcagataccttagtggaagctttggctgaatagaagttccatcttttgtagtactgaaaccaagtgaagggattacgtagttgacatctctgaaagagagaacgcagtggtaatgagaatactccccctacgtttgtgtatgagccttggcagtttcttttacactctctcatttaatcctctaagacctgagacattgttggggcaagtggaattattctgcattttatagatgaagaaatggacttggaataattaagttatttacagctaacccgcaccccagatctcttgacctagccccctgcatcctgcctttgccccagagtgcttttaatgttctgcattgcatggtctttttgttcattttattttatgtatcatagttaatactaaactgaacgtttgctgctaagacctatattattttatattcccaatgaatatgacttctgcataaaaacatttaactagggtaatcattttatagtatgtgcctgttgtctctgctatatctatcaccttcatgtgaagacagagaaaatagaatatgctgtgtattcgaaataatttcttctttacaatgatgtattctagattctaacatttacatatgagagaagcttcataaatgttacgttttctgtggccgctatttctgtcttatctgtgctgtctacacagtgaggacagctgcagagacactgccagtctcatgaagtgtccattgtgaaggcccatgtgtcagtgctgctgatggcatgcaggagttggtcagtaggatggttaagaacatgggctctggagtggacggtgtctggcttcaatctggggctgtcacttagttggtgtgggacctctcatctctattgccaacccaagtttttgattctttctttcctcagtaaactcttaatctttctgtccttggaatcttctcctttcacttcaaacaactcatctgtctttatcctgaaaagtttatactttactaagttccatcattggcagcaaccctgttttcttcccctttgtattaatattttttttttttttttttttgagatggagtttcactcttgttgcccaggctggagtgcagtggtgcgatcttggctcactgcaacctctgcctcctgggttgaagtgattctcctgcctcagcctcccgagtagttgggattactgttgcctgctaccacgcccagctcacttttgtatttttagtagagatggggttttaccacgttggccaggctggtctcaaactcctgacctctcgtgatcagcctgcctcagcctcccaaagtgctgggattacaggtgtgaatcaccatgcccggcccccctttctattaattatccaacatctcaaatgtgcagttcatcacatttttggggtggtggttagacacaatatagttaacctatttagataaataaactcttttatttcccctgagtgaacatttcatctaaaacgtgtgtcgctttcttgcttaaaaaccaataaagctaatgtttctcaagtcatcatatatgagtagcatgcaagctccggatgcagctgttcctctagagactactgttgcgctccttacaagcctctagagcactagtgaagagtaatgttagattgtttcgggtttggtcaacctttcctaagactcagtggacagcaatcagttaatgtgccaagaagcataagctaaatccagattgcaacatactactcattctgaatctgtaagggaatgcctctgtgagtcactgttgtgggaatgtcctgggatggcatagttaatactttctaatgggatttaaaaagtcagtacatttctctttttgaatttgtttcttaatgatctgatgcacttttggataagatacagcttgctttatagaacagaaaaaacattgtcatttatacatgatttagctttatgatcatgatttaaagccaccagctttgtgggaggaagatagtgagaatggccatgacagctttaactacacccttgaagacctccttgcttactagagggcactgtgctgtcctcagatgccctgaggcaggtcagattgggataataattacattaactcccaaactaccctgtgctggactttttttttaagttatagctctatggagatataattgaaatatagtaaatgggaaatatttaagatatataatttgatatgctttgacatattcacagtagtcccctctcacctgcatattcatttttttgtagtttcagtcacctgtggtccgaaaacattaaatggaaatccggaagtaaataattcatcagttttaaattgtgcaccgtcctgagtagtgtgatggaatctcgcaccatcccttgtgccctgtaaaatgaaggtgtattccagagaacaaaggaaggatggagcttttatagagcatctttctgcccaggtttgcattcaggtatattttttcaaatgaaggagtccaccttgcttagttcaggttgctcagtgcaagtgatttctgattggttggtgcaggctatacagtctgttggttcaggtggcctgaacaggaatggtaagctgcgaaggttcggagttaaacagatgtgtaggttttctggaaacttggggtacatgtgtgaccattagactcagttagcccctcaggattcatcttgagggatttgctctttgaggttcacagtgatcagatcaactgttgcagtatctcagtgcttgtgttcaagtaacccttattttaattaataatgaccacaaagtataggagtagtgttgttggcaattaggatgtgccagagagaagatagaaagtgcttcctttaaatgaaaaggtgaacgttcttgacttaagaaggaaagagaaaaatatgctgaggttgctaagattaagaacaaatctatccatgaaattgtgaaacaggacaagtaaatttatgctggtcttgctgttgcacctcaaactgcaaaagttatggccacaatgtgtattaagtgcttagttaaggtggaaaggtaaatttgtgagtggaagatacgaaccaaaaagatgttccaattgacagcaatgtgttgtgccagaatcattcagcctatatgacgacttgagcaagggatcccttgaaatgagttacaccaagtgagggatagttacacagattcaagaatacagataatcagtagtagcctaatgctgcgtcacaatgcatacgtctttcaccctacttcatctcattacataggcattgtaccatgtcacatcattacaagaagaaaggtgagtatagtacagtgaaatattttgagacagcccatgttcacataactattattacagtatgttataattctattttattactagttattgttaatattttattttatgatttataaattaaactgtatcataggtaaatatgaataggaaaaaacagtatatatagggttcagtactatctggtttcaggcattgactggggcctttgaatgtatctcttgcagataaggaggactcttgtacatcatgacatgtgtggatccaaaatctcaaaaaaacaaaaaacaaacaaaaaaaaaccaaaatctctttttgtgtgtgtacatgaattgttccagcaccatttgttgaaaaggcttcccttccttcactgaattgcctattcactttcttggaaatcacttgtccatgtatgtgtggatctatttttggactctgttttgttccgttgatacatttgtgtctctttgcaaccactctattttgattgctgtcacttcatcataattcctgaagtcaggtatcattagcctcccaactttgttttcctttttagaaacagcttgttagtttctaccaaaagatatcctgagattttgactgggattgcattggatcttgtaaatcaatttgggtagaatagacatcttaacaacatcgagtcatttctgagtctctcacatgtaaaaccattatctgcgtttaaaatgtaaaccactcagtgtcaccgatcataaaccaaaagtgatacttagggtaccttgaaattacattaagcagaacactgggaattggtctttttgcttgatttgcctgagtgattctccacaaaatccccacttaatatgataggtatgaatacgggatgccttatccagagcagctctccacaagcatcctcacgccacagatgccagttgaccgttacgtgtactcacctagcctgctggtacctgccagatggtgggcattttgggtgagattatgatagatttaagccagaggttcaggaatatccacattctccaaaaaagaagattaagccattattattgggagcagcctaattctagttatgaaggaaagagatcagggtgccatatgtacttagatagccatgtcttttatagcacatagcctttcatgttaaagctccgcatttttctaaaggagtattgattatagtaaggaagccaaggttcaactcgtgtatgtgtcaggtagctggatcattcattaccaccataggtgacacccatgttgatcagttacataaagaccacaaatggaatggtaactgggtcattgcaaattaaccctttctgaaagacagttcaggacatatttatccttgagagtgagcctacactatcctcctaagacctctcttttaagtggagaatatacattttggaaacaaggttgtattgtggttgagggcatgaagtcaacctgcctgagttcaaatcaccactctgcccttttctaacttttcaaatttagggattcacttagtttctctaagcctattttctttgagaatatggaaaattattatagtaacatggggaaattaaaagtgagtaattgtacaagtttagtgcacttgatatgttttgtttttagcatattttctccatttttcctttttccttttgtgtgttcttgttgccagtgactacctgtgaaatgtaaactgttgagtgaactgcttttgctttactttctgtgaattacttgttctactcactgtgttctgtctcttccattccctccgaacacttttgatcttttcgttttgccccagtcttctttcatttaaaaactaatttctcccaagaagcctgctctataaaggatgtgtagattagatgaggtgtgggaagcatgtttacttataaagcaacacaataccctatccatatccagcctgtaaaaataaaaatctaagtgctttttttttttttccctcccaagtaaagagaaaagtttcagggttatatccttaacatgtaattaagagagttcaagatattttatgttctatatagcaatgcagagaatatttaataagcattaacaaaaaaacttaaccttgtggtagatagcattgtactaattaacagtttattttatttagctacaagaactatgtcagcatgagagctaacactacttatgtttgacaattttagaataggaataaggtaaaaatactcaacagagataatggtagcttgcaaaccgtttatgtcaaatatattaaaatttggaatagttgaagactagaatccaaattcaagagtaattaaccaaaatagttgacagatgtcagccatgctaataaaatttgtataccctgaatattttccagcttgtaattaactgcacagatgatgtgatctgattttgtcactaactgcttattaatgaaggagatgatgactagttacaaaatccatagtgctagctgaattccaagtttaaatgtttctcatacagccggcattaattggagccacactagcctccatgctggtttgatttgtgcttactttcttcatttgtaattgcgaaggggaaactgaatttgttaaattcagctctgagtgaccttgaagatagtaaatctgtttttatttggtggtcagcagcgtaatggcttttatttttagattctttcttataaatgtattgtcatcaggctagtgatatcaccattggaagttgtataataaagtgcaaactgattatttcaagttcagctaaaccacagcagaacatgatgtcaatatgactgaagatgtgaacacagagtgctattaacaaatggtttaataacaaaagagcattatttatttctatcatatacatagcacggaagcctgagaagaagcaaaaggattcaagagaggcggttgtgcagccttcctgcctgcgccagctctctcccagactcctatactgctcttccttctttaccttacgttgctgtttccctttttacttctttccctggaaagggcgggtttaattctgtccttatttataagacagagatgtttgctacctcctgagcccaagtctgccagctgttggccttcttctttgggtggtctccctggcagtgtggtcttacagtatttatgtctgcctgctagctggttttgcctgttggacatctccacttggatgtctaccagacatccccaacttccatgttcttagtgtcactttaattttcctttccccaaattattttctctaccgtagtctcttctttcttatttttgtatttctgtgtttaggagtgcttaatgaatatttattgagtcaatgggtgatttcatgatacaattatagtagcaggtagtactaaaaagaggaactattttctccttatttaagaactttttataagagaactctagtttttcaaaattctgtttaaaatgggccacccagaactggacacactcttctgttgttcgttagtgttcgccttagatggccccacctctctgtcccctctctctagctatgtatatttcttttcaacagtcagttgttagattgctgtccttgattggttttctgttttcagtaggccagtccccagctaaattgggtgaccaacttggctaatgtccagttttatctaaagtgatgttccctgtttgcacagatgactttttaaaatctcctgcaaatgtgatcccctttagagccctacctgcatggtttgaatagcctcagtagccaatttcacaaacaaaaatgtaaggtctatgtgatgtagagtaataagataagaaactatttcctacttacaaactactttgaaaaattttgaaagatgagtttaaaatgtttaaaacattggtaataccagcagagtcagtaggcatatttgtaggatacttagtataaattttggtgtatttattttcttaaaataaatcacagtgaaatcatattattgtatcttataaaatgccttactctgttgaaaaggcagatttatattaaaaacctactagctgcatttatattaaaattgttcaccttattaacaggtcaaacaatatattcttttaagaattcacattttaacacttgggtttcagctgataaaacttatatgcatttgggtataatcttagatacctacaaaacagcaccaagacaaaaatgggctcaataataatgagagagcaagtattttaaagaaaacagaatttactgacttttaccatggttaggttaagttaggttaaactgtggaaggaaattgtgctgtctctcccctaaaaagtttaagagcaaattatcatcttgaatggtttagttattcacatgactgaagttaggaaccattccttttaactttttattttgaaataattatagatgtgtaaggacttgcaaagatagtacagagagctctttgtgctcctcacctggttgctcctaatggatattgcttatataatttagtacacatcaaaatcagaaaactgacattggtacaatgtatatgtgtggttctatgtcattttatgaaccttccttgaactcttcttaccccacactgtttataactgtcttacatatttcttctacacacattaagaatcacattagacaatattatttttgtttcagccatcaaacataatttagaaaactcaagagaagacagtctattgtgtttacccatatttttgcttatgttttttcttccttcctttccttcctgatgttctaatattctcttatcacttttgtttttttcaactttctttacatattcttgagggtcggtctactggagacaaattctctttattatttcaactgagaatgtcttaatttttatcttcatttgccaaggataattttgctggatatagaatttgcagttgacagctcttttctttcagcccttgaaaaatgttctattgctcccttctggtcctctttagtttctaatgagaaattctgtcatttgagttggtttccctgttaggtaagatctcatttctttctcaagacatgctaataatcataagattggttattgtaattcaagcagctactatgtgcttggcatggtgtatgctgtctgtaaccttgaaaccctctattatctctattttgtggataaagaatctgaaactcatgcaagtacattaacttagctaaggtcacacaatttagaaatgtttgagttaaggtatgaaccaaggcttgtgtgcatctaaaatttttgcactttatcatacaattgcggaaagttggagacaatcttatagttgataagttttctaccagcatcttacagcaaaaattacaatttttctgccagtcctttctttgactttgagtagaatcttaaaaagacactgtgtaagagccacgaaacttccttgcagaagctgtatcatgctaaatgttttggatcaattcaactcaatttaataagtctctgcttttaatttcattttctcaccgtgcattataaaatagcatttgtagaataagttaataataattttaagcaatacctattttcaaacaagacaaaattattattctatttgaattcaatccctaacaaataactagtatcaaatcagtggtactgcaaagaatagttaatatccagggtattgttttagctgcaagtgtttgtggattactgaacagtcaagtgggtttgctttgagattattgctttcccatgtgtttattctcttcacagtctttttcagttgttgcctggttcatctttttagacatcatgtaattggtagaacaacagtcaagaaaaaggttgaaaaaaaatacagatgagttctctggagatacgatgaagcaatctgagtgaatcatgatgtgcagtgggctttaggtttctatttttgtgcaagggaccgattatagagctctgaacttgaaatcttattaaaatctctgaagatgcagtagaatacatctcatttaagaagtgttctctaagagatttataattcagtattgtttatatatgtcttagtatattagatattattcattaacctatattagaggagacaatattttacttaatattttcttaagttacaaaagtaaaataacttaatagtaacaattggaatgattaacatattgtgaagcgaaacttatctttaccctagctgattgtgtaccatctcttctcaaataatgtgatattaatctccaactgatgttaacattgtagggtgtatctcttcatactcttccccatgctcaaacaagtacacacacacactcacttactcttcacatgtgttggacttcaataataataaatgtatgcttcataaattggaccattcgctaagttgccccccaccccattcttctaggacagtatgtatagaacagaatcacttaaaattaactggagtgtattctatagtatgaatgtactaattaattcagttattgcatattgatgtacatttgggtggcttcctgtgaggtattgttttttgtttctgttataaacaatgagacggtaaatatcttagcttatatatcttttttttttttttttttttttgagatagagtttcactctcgttgcccaggctggagtgcaatggcatgatctcggctcaccgcaacctctgcctcccgggttcaagtgattctcctgcctcagcctctcgagtagctgggattataagcatgcgccaccatgcctggctaatttcgtatttttagtagagacagggtttctccatgttagtcaggctggtctcgaattcccgagctcaggtgatccacccacctcagcctcccacagtgctgggattgcaggtgtgagccactgcacccggcctatatatctttattcttacacaacaatgctttgatttccagagggtaggtttctgataatgggactgacagttcaagggatatgtatacttaacattgtatagatattagtagatttctttcctaaatgtttactgcagtcttgtataaggttcattttatcacatctttaacagcactaggtgttatcactctttaagcaaatgtgatcggtgaaaactgctatctcgttgctttaagttgcatttgctgaatattggtgaagttgaacggcttatgtttattggccatttcagttttgtcttgtgtgaatttctgctcatattatctggccatttttctattgagttgccttttacttaccagtttctgggagtagtttttatattagggatattaactgtttggttatttattttggaagttttcccagtctatgtatttttgaagtggtttagggtatttttttttgctctagaataaattaaaatatatgtaatcacattgatctatctttgtttaggttttccatcttagttctacaaatatttgcctaaattctcttatgaatgttactgtcttattttttatataaatatcttttaattcatctggattttacttctatatatggtgagatatgtgagtcaagctttgcatttttgtagatatctagccacttattatgctaatgccatttagtaaataaaccaccctttctttctgaatttaaatgccatcagtactttaaaaaaatatttaaatggttacatttttccccagcttaacccattttcagtaaggtaatgactttttaaaagcaggatttagtaagttgaaaaggttatttctctttgctcaaatgtcaaatgctacctgttactctttattgtttctggctaaaattgcgagcacaggaaggattattcctgcgaacaaattcactaatcagcttgcaacctaacaattttaagaccctggggaaaaaagggaaagtttgggatatttactcatttcttctgtaaaagcaataacatgtaaacatagtgaagaaaggcatttatggaatctaagaaggaaagctctttgcttttcacatacagagaaattaggattcattgagtcctttctttacaacataagctctgtaggaatggttctccaagtaaagctgtgtgtcacgttttggggctaggggtgcctcaaagctgcacctacagagagatctgaaggcaaattgccgatttcacacttttattttgggctcatcctttatgccctgcacagagcgatcagatccatacacatcttactttcattcattgtggaaataatgtcctcaggcttggtggtacaaaatcgtgctttctacagtcttctgctaggaaatgtttattggatttagctgccattatacaaatgatgaaggagaggcaaagtaactccagtatctctagccaggagtggcttgaagaattgtatcagttacagatttgagaagatttgactatatgttgaattaggttagatcatctttataattagaagtaggcttttggagtacaaagaattcttctgtaaacaccttgaatatttaacaggaaggccataaggaaatataatgtgctacattcctaggatagaataacatgcagctattaaatagcacattttgtgaatatttaatagtagcatttaaacccaaaagacactgagcggcagagacctgtgtaactagtttgttcgttcatttcttcattcagccaatatttactgaacatcagctgtgctttcagcattttgtgaggctctggggaataaagatgaagggtgtagtctttgccctcctatagcttaggagctagtggacactcaggttacatcattgcagaactgtttattaacaattagccacgtgtccaggatgccatgaaaacgtagaggggaacacacaaatcagactggctgttggggggtcgacgagacttcatggaagtggtcacatcggagctgcgctccagaggaagaaaggaattaaccaggcataaaggttgagggtggttggagggagaggagctttcaactaggggtgaatagtaaatatagacactgaagaaaaatggaaatgtgtgtggtaaagtccgttattctgtataattggatcatatgtatgtgcacatgtgttcatatttatcgatatgtgagagatgatgtatagagtttggtaatagtgaggaagacctcttaccccaaactaaggtgactggttttgtcttgaaagtgggttatagtaagtaggggagtggtctcttcactgctgtttagaaggacttctctggacaaatgtgtggatgaggtattattaagcccaggatcttgaagatgagtagaatggtagcataataatctgggtgagaaatgtttggggcagataataaagtgggatgtttgagagagattttaagaagtagcagtgctagcatttgggatataaaggaagggaaggggtctaggatgatacgtagatttctagtttggaacaagtagacttgcagggatttggtttatgaaaacgaggggaggaatgagtttgggaatgggaagctagtgagttctgttttagacttaaatgtttggaggcttttagggttttgtggggacaaatgaagatctttattggttggctgaatagatctgaccttagctcatgtgaaaagagttggagattttgacattatcagtgtatataggtggtattttagtcatgggagtatatgaaattgcatagatggaataattgcatgaagagagaagagggatgaagatggagacatctaagatgtaggcaaaggatcacaagaagacactgagaaggaatggcaggagacataggaagaaaataggaagagaggagttttgcggaagccaaaggaggagaaagtttcataaaggaaacgatagtcattgcagtcagatggcacagagatttcacatcagctcatcctcaaacctgtctcctgggtttggcaataaagaggtcatcagtggctcaggcaagagaatgggaggcaaagtgagaggagtttataggttggctgctaagtggatgatacagtagctgggagatgatgtagggctgagcgagggtgtgggtatgtaagatgaacaagacgtgagcaatgtcctaaatctagggatgggggagagggtgaaaatataggagaaaggggcaattgttgtgaagttccaagagacaagcccggagttccaggaaaaatagggaccgctttcccactgagtctggagagaggaaggaacgttttaggatttaaggcacaggcaagtttgaggtagggcagagtaggccagggaagaatgcgaatagctgcgtttttgtttgtgaattaaagggtacattctgaggaaatggagggaagagagagggtcaggggacttggacacggggaagggagctgccttgcactgaggcctctgcagatgatcacactgcatcaatgtgatcaaaatgacgtcagtgttatcagcagtagaatcagaaacaagtcgatttcatctaatttccattatctttcactatgtgagatatttttatcctgaggatttacatgtaacataggactgagtgatttactgaaatttaagctacagccaatatttgattaacaatacaggtatgaaattaaacagtactgtcggccaccaggggttctactctgcgtgatcactttccattttgctctccttcaaaacgtccacattttttctctcagtcataaacatttaaaaaccaactgtactgggccaatcaaactagtgtagtaagtgaaagacttagagaagtgtatgcaggtggtgttgggcaattgcaaagagactagcctccaaatgggagtgttagcatagcacgcaggcttctctccttatgagctctgactccaatattgactcttttttgtatacagaaaacataatctgttcagaactcattacagtgaaggaacttgtattttaaaaacagagatagagaactaaatttgtattgagttaaattgtataaattctttaaggatttcaagggtaagccgactcacatgattaaagtaagttatgagcatttttgtttatctgttcagtgtgtttggggcttttgtcgtgtcagctttctttaggacaggtagaattttatctaacctcttaagaacaagtggttattttctcaaggactctaggatggtgctagataccccagattcttaggtgctggctttatgtgttgcctttgctaagcacttggttgctttctgccactctttggaagcaggtgattgatactagaaactgacaggttgtgagtgatgtacccttccattaaaaacagatatactaatttgcttttcaattgtagagagcctcttactataaacatccctgtaataaaggtaaccttataattagtatgtcaaaaaagcaagaaagttatgatgaacatgcattaataacaaatcaaaacctttactaataaaatgtcacattgagaggacttaattttgtgtacactttcatactaatataaggcactcttgctaatagtgaaagatggaaatatttgccaaccagctatgttatagaagaacttcctacaatattgtcctatgtacggtgacatttagaattcaaggaaatatacatagtcattgactttgtgtggaatttccctcccctcctccaccaccctgttagaaatccccgctgttgactgtttccagaagtcttgcagggtgttgtgataagagtccaattcctcttcccattcctgcctaggtcatctctttcttccctccctccttttgttctgtgattctttgttttatttttcaccacagaacatacttcattatgctgcccctgttaaaatcagttaccctattccacctgattcatccttgagaaaactactcatggccattgtgggttttaatgccactgccatccccgtcttgccattgcctcctcagctctgtcctgctaccacgatagagtggaccctgtgtcacagcaccattggtacccatcctgccactggtgtctagaactttgagcagtttaaccccccccggttttccaactctttccctcaccaacttgtgaagcctctgaactggtatctgagcagagccagtgccttgcactgtgggagtttcctgtcctaatgcttaaacaatggctctagaacttggctgggcatgaggaacatcactggcttgtaagggatgcagagccctggtcccctgaataagttgccctggtgggccaaataatgttattcctcacatttggtatccacatcaaatccctggaacctgtgaatgtgaccatttggacaaagggtcttcgcagatgtaattaaattcaggatcttgagatgaagagattatcctggattatctggtggaccctaaatgccagtacaaatatccatatgagagagagacacagagggaggggaagaaaggagaggaggcactgtgactgcaggcagagattgcagtggcgaccacacaggaaggaatgccgacagctgcctactgtaagaggcaaggagcagatttccccttagagcctccagagggagagcagcctggaacttctgggctcaaaccatcctcttgccacagtctctccactcactggcactacaggtgcaccaccatgtctggctaattttttttttacttttcatagaaacagggtcttgctatattgcccaggctggtctcaagcgatcctcctggactcaaatgatctcctggactcaagtgatcctcctgccttggcagtattttttttaatggcactgagagacagtattatttcctcccggcacatttggattgactgttaagtaatcacattcatttcctgattttgatacaatgtacgactggttttgtaggagaaaaagaattgggaagttttaggaattagaagttatgtagatttttaaacattgagaactttgtcattttcattaaaaggctaacttttttgttataacttatttcctattcacagtacatcaccagctgcttttttacttatataaacttggacccgagatcaattggttgcctgcttactcattctataaaaatttggaggcaccatacagtaagaatacataaaaataatttacatcaaggaaaaccaggtccacaaataaaatcgatacagctagattatgaaaatcaactcactttctagagtttcatctttatcattcattttaatgttacgttttttcagttttcccatttaaaaatgaacttttattaatgcatttcgattttttcgtgttccccaagatttgtgtgtgtgtgtgtgtgtgtgtgtgtgtgtgtgtgctgtgtacatttaagtctatgcaattctgttacaggtgtgggtttgtgtttccacagtcaagatacaaaatagttgcattactgcaagagtcccttgggttgtcctttcataactatcccttcccaatctctgatcagctgcaataacacatttgttttccgtttctataatacggtatgtaaccttttgggatttgctgctttactcagcataattctcttggaaataatctgatttgttgtgtttatcaacagttaattcatttttattgctcaggagtatttcatgatatggaatataccatggtttgactcttagccctttggaggacatctaggttactttcagttgttgagctgctgtgaaaatttccatgcaggtttttgtgcagacatcactttccatttctctaggatctgtgcccaagtgtgtaattgctgggttgtatagtaattgtgttcagtattataagaaactgccaaactattttccagagtgactgtaccattttactatttcaccagtgcttgagtggtaccgtttctctgtatccttgcctgcatttggtgttatccttatttttttattttagatattctgataggtatgcagtgatatcttgtggctttaattcacatttttgtaatggctactggtgttggatatcatatgatatctgttcgtgtcatttgtccattttgtaattggatttttgttttttttttactgttgagttttaaaaatatatattctagatacttgttctttgctggatatgtgggttgcagatattttctctcagtctgtagcttgtctcttcatcatcttacgagggttttcacaaagcaaaattttaaattttgatagatctaatcaattttttctatatggatttgcttttagagtcaattctaagaactctttacctaccattagttcctgaagattttctttcctttttttttttttctaaaagttctatagttttaagcattacatataagtgactcatttcaagttcattttctataaatgtgagacttgggtggagattcatttttctttttaattgttcaatggatgcctattatgccagcactgtatgttgaaaagaccattcttgccctgaattgctttttcatccgtgtaaaaaattagctgggcatcttactgtgtgtctttctggcttctctactctgttccattgatctgtgtgactcttcctccaccgataccacacagttttgattatggagctatatggtaggccttagtattggatagagtgattcttctcactttattctctgtcaagattgttttagctattctaggttctttgccttttcatataaatttttaaatagtcttatctgtgtctgtaaaaaaactttgctgagattttgataggaattgtgttaagccaatagatcaatttggcgaggagttgacattctataaggtgacattctatgcatataagttgacattctatgcttagtcacaaattctttcagttttccttgtcttagaatgttcttatttgttgttcattcctcaagggtgatttcactgatgtagaattcatggttgacagtccttttctttcagcacttgaaaaatgtgttgaaaaccttctggtctccatggtttctgttgagaagtctgctattatttgaattgttattcctctataagtacagtgttgtttttctcactgatttcaagatctttttcttcagtttttattaatttgtcttgctatgtttttccttgagtttattttgtttgggcttcactcagcttcttgaatctgtagatttatgtcttttgctaaatttgggaaatatttagccatcatttctttaaatattctttcagccccagcaactttctcctctgcttttgaagctctactgacataaatgttggatcttttgcttttgtattacaggctctgaggttcagtcatttttctcccagtctgttttctctctgttgttgctggtcaattccattgctctatcttcaagttcactgattttatgctttgttatctgcattctcttattgagctcattcagtgagtttatctttcagttattgtatttttcagttctttaactttcatttgtttttaaaaaaataacttctagttctagatttttttgttttatttttttccgagagaatacatagttgcttgttgatgtatttttgtgatggctgctttaaaatccttgtcagataattccaacatatgtctcttcttggtgctggcatcagctgctagctttttctcactcaagttgtgattcccctaggtttggttgtgatgtgtgactttgaagtgtctcttggacattttggctgttatgttaggagactcttggtcctacttaaacctgttattttagctgacagcccccttagttaggtttagcactcaggttctggcctgcttttgtgggtggttccaatgagacctcaattttagagcgtttgtcttgctgtttgggtgtcttttgttcatctgctgccgataggactcccccgatccttgcaggtgcctctcaagggtgcacaaggtgcttccgcagtcctggctgcctgggaactttaatgggggaagggagtctggaaagaagtgcttctgaccactgttgtcagtgcggttctctgttgtccgcttttctggtgccactgtgcttacttgggtgtcgttactgggattctgtttggtccgggcaaggagtgagcctgccttagctgctgcctttggttgtttgtaggtcaggaaacacggggcctggtttgctttcttcccttaggtgaggttcataagatgccctgccattacgttgtcccttcagtcttggccttcctaaccagttagtttgcctctttccacctttcttcttgcaggaagaaaatttaacttttttttctgattcttgtgcctttcccgagccaatccccacagacactatacacaatgtcttcttatctccctttaccttcccactgtcacaacttgtggttcaatcataatgtggtgtgtacatccttatgactattaattattggtcatagctgacccatacagcatacgatgaggatagctcctctctttccaggtttctgttttgcctggttggattctatgtatttatgattagctcatctctaaactgtatgaatttcagcttaatatggccaaacttgttgactggcttattatttccttttccttttcttcctggagatcttcctctaagagctacacatcagtatgagctgattgttctctgggtcttccagacagctctcatcttggcacctcacaccaccaccttctccctgtctcctttgttgttaccctgattccttggactccatgtctctctctctttctggttttacttgtttattggagcacaccttctgggagtttcctgagaatgcatgtgtaagaagtaaatgtttagacacttttgatctttggaaatgtctatattttactctcacacttgtctaggtaaaaagttcttggttgaaaaccattttccttgagaattttatattgccctttgccttatagcctccagtgattctcttgacaatggaagtgacacttggattcttttttgtgtgtgtgtgtttttccctgttggaatactcttacttgtctttttctttgatggtttgaaattttgcattgatattcgttgatgtggcatggtggccttgatctgggtcttggtgggttatttaatctggaaactaatgtttttcttttgtgggaagatatattattttcccagaaagaagtaataaaattatttctttcccctgttgtctctcttttctctttctgaaattcatttaggatataagctctaaaagtagagggatttttgtctatcctaagtgcctagagcactgtttccatagagtaggtccatataatacatgtattgcacagatgaataaatgaactccttctatgtggctgttaagtctcctggatttatcttcaaatttgtttccctcttttattgctcagttctttttcaggccatctacccccttttttcttcagaatttttttttttgtacttttttgtaccttttctaaggtaacagttgtggcaagaaacagaaccatctacaagtatacaacctacctggaatggatttttacaattccagagtaggaggtagatagaggtcatgatttattgttttctatataaatgtctgtttgatgcagcatcattataattaacataatcatcctttctccagtgcagcgcagtgtcacctttgtcctaaattgagtgactttgtaggactctttctacttgctccaggaaatacagattacgtttcattggtctgttttgtctacctatgcaccattatcaccgtatcttaattaccgtagttttacaaatagtctttatgtttggtaatgaaagtgctctaaattcattgttcaggattgtcttgatcattatttaatgggggaaagagttttaagtttccatgtaaagtttccatgtaaacttgtagaatcaattgtcaaatgacatacacgtaaacacagaccaaaaaactctgctcagatttcgaatgagattgcattaaatctatagattgacctgggacaattgacatcattatagtattgtatcttctaacctatgatttttgtgtattctttttgttgtaactcttgcattttatctgaaattgcatgagaagttttgtctattctttgaagtaccttgttcatttcataggaatttggtactgtatttgtagtacctttttatactcctctttatgtaaggtatgctttcagttgtcatactttttgtatggctcatcacttttaaatgttgctggtttcaaaagacttgaaatgcacaaatcgtttgctgtttatgtattagtttttaacattatctgatgttgacaggcagtcgatatagtgctggatgtagccactccccagtgccatgaagaacccagtttctgcctgcctttctgcttctccttccttaatgtgttaatttttgttctgtgcttttgccttatagttgaagcatcactttcctgtttcaagaaggaagtggggaggaggacaaagggacaaaggagatgtctgtagaatgtattggctctcttttttaaaatcagggaagaaaatgcttttctaagtccccaccccataaattgcttcgtcgcatattgttgggaagaccttggtcacatgaacctcctggtcgatcatgaatcaagggtagtgagatggctccacttggtttagaccagttgtgatccatgtccttggcctggggtaggggccttcccttcctctccagtactgtttgaactgattgggattccttgaatagaaaaggagagagaaataatgtgtaggtaagagaaggtatctctcgtgtttattgaggcttttcaatatgtaatttgcttttaattttaagaaacttgcctgcctcttggatagcaaagaaagtgatttttatttgtattggtcttgcttttgccaaacattttaaaattaagtgatttggggataagtatttattttgaagtctattttattgtttattaagatatatttcaaagtggtataataaatgacattattattttcataaactattgcttcctgaagtgtttcaagccaaataaacatttatctttttgatgggaaaatgctttctaaatttccctcagccaagttatagaatggagccaactgcagtacatgtgggtcacaacctgcttgccatagttgtattctgggatgattgattaatttatgcctttcataaggatgctctgagaaagaaatgagtgagaagatttaattactgaattattaacttttaggagctccactttggaatgtgagtcaatatctattacagactgtacgtgtttatgctattgaaaatatgaattaagaattgtctttggttatttgacaactcaaaagattttataactttttgtgcagcttaaaaaggaatttagaaatgtacttttagaagggaaggaattcggataatttatatgtcagtgtgtcataataatttatttacaccaaaatctcattcacagattccagatttaatgacctgaatcttgccatttcttttctttaggcctacccttattttataggttctataaaataatcggaaaggaattagaaatagttttgtgtgtggtgtcaagtggctttgtttaatcattgggaatgaatcagttaaaaacttattttggggctaaaaacagccagcccaattgttataaattggagaatgaatgaatatgaaaatctacttacagaaaccattttaggttattcatatttcctgcttgctctgtttcttgtcatttggtattttaaaaataagtcttagactagattcttgactaaatagcaacctttttatctttgacagagacacgtttcttacattataaaaacatgaacattcaagaataaatcacagccaacttgaggaccatacatatctgacttggaaatttgctaatatatacagatttaacgggattttacacattttcgtgtttttgagggcttgtaaggtttcagtttgattctcatatatgatggttgatgtgttgtacaaaccaattaggagagcaatctagcaatcccttgttgagttagaagtgtgcagaccctaggacccagcatttaccttaggcggtcttactgttgttgcatcttggctttgtctagtttctcttgattcctgtccatttttggaaccttgttttctagtcactgtgacaattctgtgagcgacatggtctgtttcccataaattctttgtctgtttgatatagctgaagttgtattacttcaaaccgtaactctgagtggtataacaaagatatcaaattttagataacacccacatcttcctgagcatcgtgtgattttagtagctagaatttctttgtacagaagtcattgtggagggaaatgatgtgaagaaaagaaagaaaatcctgagaacagagcaacagttgctgtggagtggcgtgagggccgaattcaagtataaaaatctggattagaatcctccggtcacttagtagttgtgtgactttggtcattgttgaactgttgtgaggtttccttttcagatcaaaactttcccttttccttctctcattcccatcttttcaacagatgacatcaccttatatgttacagagaaacagaagccattagatggaaaaaacctcaatatccaacttacagaaatgactgacctgcatttatcttcagcatttcctccttttattaaatatctgaggtcagtatctccacttgggttttgagttccatctttttctgtcttcctagggaacatgtactatcaatttatcttttccctttcttgaatacccaacttgttgctcttaaccagatcagtttcatcggcatttaagcatgttcaagactcttctgtattaaaaaagaaccacgacctcccctaacccttccctaatctaactactgcaccctacctcttctctttgcatttacagcaaagctcccggaaagagttgtctgctcgctgcctcagcccacacctttttcatgtggtttccgcttctgtcattctatcagaattgctctgcagaggctgatcagtgacttcagtgaaaccaggcctaaaggatgctcttcagttcacatctcactcctcagcagcattcttcaccgcttgccgctctatcgttttgaaatacctgtaacaagcatgctgccttggtttccctcctaaatgacctctgctccctctcctctcaatatctttctctcttcccccctgccccgccgaggttgagtatcattataatatcattgtctacctattattgaatgttagcatttcccaaagctagacctagttctgttccattctcaacctacaatcttttcctaagctatttcattcatgtacatagtttgaattgtccttttatgtaatattatagatgattcaaaaatttatctgagctcccatcacgtctatctacctgttaacttgatatttctacttatatctttctaagccatctcaaactcaactcgaactagaccaaacttacctatctacctagtccagctgtaccataaactttgatgccttattcttcttgatgcctcatccacattaactccacttatcaccatattttcacctcaaacacctctgtgatctctcccctcctctctctattgccgccatcctaatgcaagctgtcatcatctctttcttggccaactgtagtagatgtagtctcatccattgtggttctttctagtctgtctgggactcatgacatcgtgcttttgggaaacagaagtgatatcatgttacccccaccaggttatccttgcttgccttctcattgctgtaaggataaagaccacagaccctcacatggattttacctccctgggctaccccatttggcagctcccccgtgtgttctcccttcctttcctctgagaggtgaattgtgccttgttccctcctgctatggggctttgcacttgtttcttgcccttccttcatcaacttgttatctaactctatcctgtgctttagatcttaacacaagtgtcatttccctgactccatggagatggggtcgagatttgtaggctttgcttattcttcatagtcctttaggtttacatttaattttgtgaggatttgattaatatctcagtaaccatgatagcaagaatatctttttgtttttgtttttgttttttcaccattttaactttggtgctgaaaaatacttgtcatatagttaggactcacatattcatgaatgaatgaatgaatgaatgaatgaatgaacatagattgagttttgagccctgcacttaacacgttctttttgtgtgaccttggacaagcttttatagaggtcagttttgctaaaagccttgcttcctcacctgttaaatagggataataattatatacaataatataattgaatgaaaagtgcataatttagtgccagtaaatgggatcatttagccatgggatcatggctttcactactggagtatttacaacttctgttttgctaaagtaggtgagttttctgtgcctatttaaactactttatatccctcaggaaaaaacgatggagccagggcttaggccttgtgaggagcctcattcatttccccctctctgctggtctcactccttgaatgctggtctctccatacatttctctgccttagtgtctgatggcttttaacatgttccctccaggacaggccataggaggagggtctaatgcaatggtgactttggaacctgaattggcttcttggacacattccaggcataagggccccaaagttcttttgttctgccttaggcatgtgtaacctcagggctttttctcccagctctggagcttcattacccagaggaccaggcagatgtcaaatgtttctcttacagttcatttatatttctctgatagctttaatctaaaaataatcaaaatcgttgtatatttttactgtgacttaaccaattgtaaaaattattctaaaaatacgcagttatttctgagaacaattacactgacgcatcgttccctgagtgaaacctatacatacatgttccaagtatatgaagcagttttttggggacagagtaacttttttttcccctctgttgaaataaggtattgggccaggcatggtggctcacgcctataatcctaacactttcggaggccaaggcgggaacattgcttgaggccgggagttctaggccagcctgagtaacatagcaagaccccatctttacaaaaatttaaaaattggcccagtgtagtggcatgcctgtagccccagctacacaggagactgaggtgggaggatcatttgagccgaagggctcaaggctacagtgaactacgatttcgccactgcactccagcctgggtgatagagtgagaccctgtctctaaaaatacaaaggtattaaagttaacacttgaaatgcctttcattctgtcagtggctctttttttgtttgtttttgagaaaagctgttttttcaagtcaacatttaaaacaaggataataaatgaagcatgaagcaaatatgtataatacattattcccgttcattgtgtatgtatgtatatatatatatatatacacacacacacatataaagtactttggcagaaatatatttcaattttgacttatttttcagttcagtttaacaggacacactaatgtcgggacagtctttaaaaatttggacaaatttttaaagagtaagttgtgacaatgatattacatgttaaatttgtccttgggaaacatagacatttatgtgattttttttccctttagtatttgacatcaaactatagcttccactgagtagttttaaaataatgtacttcgtgctgctaaggctaacattgttgctaaccagaggaaccacagaggaagacttttgaaagagagggcacaaactcttacagatgtcaagagtcagaatttacatgtggtggggctaatccgtaagtgagattaccgttagggagctccttgacgcaaattggcattgtgcctgcacttccgtgtgacaagtgggattctcagggtgagccctagagtgtgctttttgacttgtagcatctctggattctgggctcaagcagaggccctcctgcccagttggccaactgcgacaatgaatggtatcgtctagaggtcatcataattctccccagcatttccataacacatacaaattaaactatgagtaaaaaaatacttaaaccaaaaataaaaatgagaagaaataggcatatgaaacataatgagtaacgtcagcataatttgagattttggcaatggaagactgaagttgagaagtgtttccactagggatactctcttgtgcctcacattagtgtgtcctgttatttaatacccacagaagcttccttttcttccttgaatggctttgcactgctctcattgctaggttcatatactgttgggtgatgggtgggatcaagtcccctgtgtgctgtgaacacacgcatcctgattcaccactttactgagggtgggaaatgacagaggttgggcctgtgttctcttgtcacctccgtatatgatcattcaggcgcgtgtctgggaaggtgtgaaggagtgtcctgtcagccagttgagaccactgtgttggtgttctctgaatggctttgcagcctatgatggagtactttagggagtcaccttttgggttggccatcagtctaacactccaagcagccatagggacgtgcagaggataaattcatataaactacacctaaggcgttcacacatggtccaagttgtctgtgaataaaaagtgttgctgtaattttccatcactctttttgtttgtttgtttttctggagtgataaagatggacatggaaccctttgaatggtgcttcaggaggggctggtttttctcttctcagatgggcaactcagctaggggaggtgaggttttgttacaggatatgccttgactactaccatgtggagcaggactgctggacatgttgccagccatgaccgagcacctgaaaaccctgtgggaaactacctgcctttcatcgagttattggaatagggagagccttaggagtcctaaggcagattttcagctttatatgctagttctgggagccgtgttctgcaggctctgccaaaagactttgacctcacaagtgagatgttccatcctgaagtcctggatgctgcttctcaaaacattaataggaagcgtgacatcaagccatgctggctctctgaagttggagaaatgctgcatgctcacttggctaacaaggtgaacattactctgtcaccacatttttatctagtatgcgtcctaatctcaaggatccagctaagttgtgtgttgtcagttggagacattagcttgggcagtaagctcagccttgcactgcttctggcaggtttactcatcttcatccactcttatctcgatatgaggatatctgttttttgagcatgttccatatccatgtttcatgtgaaattgcttgtcattcttgcttatcacttaaaataataactggctcccttcttttgtagcatttgctaatagtggcagaactatttatacgattatgataatctgtcaagaggattatgcaaagtatctccccccaccccttctctaaagcagagttaaattgaacactgtaaaggacattttcataaccaaggatttttaccaattatttactgtggatttaaattgatactgaatgactggaggcattgatttttaaagctggaaatatttacaaaccatccaattctttttccttagtattttgtctctagttacttcgaaatctctctcctctctctctctacacacacacacacacacacacacacacacacacacacacacacacacacagagatgtaaaacatacacatagaaagactttaaggaaagacatcaaaatggtaaaagtcattatacctggttggttgaattgaagttattttatacttctttatacttgctttcttcatggggaaagtatttttatgatcaataaaaatatttttctgtaatatgtatgtactactttacaatattaaagcactttcacatttttccaaaaattaaaagcacagtgaaatttgcacattgagaaacatttggagccaattaaatgccacttatgtttctctaaaaaaaaggaaactacttttattcatgtaattaagagccccactcatgaacattaaagaattgttgcccactgtacttttggtatatgtagaaatataaaaccaaaaatgtatagtataaaaataaaaaatatacaaaaagtaaaaatataccaataacccagtaaaacaggattttgattggtatttggagaaattagctagatgtttatctgaatagattttttttgctttttagatatttaataattatagtaaattattttaaagtcagtatctgtactaaagtatgatagaagttggaatttatgttttgcagctattaaattttcttaagaacaaagtttgtttaaaccttacattcaatttcttcgtttgtgatttctttccatagtttctttgtattacaaattgagataaaattaaaggtaaacttaatttttttagtaaagcatttgagattggatagtgttcaattaaaatttgttctctaaatggaaatttagtctttttcccttagcattagactttattagcttgtttgctgataaatgcttggaggaatctgaaaatgcatcacaagtttattagagatcttttatgtagttattaggttttctggctttctaattatcatatataggtgatgtaatcattgttgtcatgtttttttaatgaagattttaaatcgttttccactgtagacatttataatgtaatctatgcaagaaatgaatatttatctcagtattttaaaatggaaaaaataaagcagagagaaatcataaagcagagagaaatcattcatttcagttgtgaaaagttcagagatatgtttgacattcctttagtcttaactgcatctgttattcatgcttttctagataactgtataatattttcttttactactaatgaaatgtgattctctcatgtccagtgatgtgttttctgaaatgatataaacaaaaagtggttaatatgattttattaactgtgttgggactcagaaaatatcccaaaatgaaggcctcagaagaagccttagaagcaaggctttctctgaccttctcctgccctcctgtctcagtcgcattctcccccgaatctacccatagaaactagaatttgtcttccccaaggcagatcatagaaaccagaacccctttccccatagccagccataaaacctaaaagtattactctaacttttcctctgcctctctgtgtaaaaactagccagaagaacattgtctgacctacggtgtttgactgtaggtcataacaccctcattccagagagtgtcctcccttatacccagaaggaaggagtattgaatacatgcccagagaggccaggaagaatcctgctgggtttccgaactcagtctgttagcattagatcgtactgtctctgttcaatagtatttcttgagtgttgtccgtattttgttaatcttaagcataaaagtggacaacttccctagtatctttgggtcttcattatgaaggcctctgtgtacacgttaataaattgggatgcgatttctcctattcattgtcctctcatcagtgatttttagcataccttcagagggtgaagggggtaggtttcccttgactcctacaacttttaacacaatttaggtatttccctaattgctgaagttaccatatgaaatattcttattaacaacgtgttaggcttaaaggccagtttttgctgatcatgtcattatgtactggctgattttatttatttatttttagagaccagagtctgttgtgatttgaaatttcgaatttcgtgtcaattatgtaattccatcagaaattccccaaaggacacacctgtaatcccagcaccttgggaggccaaggtgggagaattgcttcaagccagaagttcgagaccagcctgggaaagaaagcaaggccctttctctacaaaaaataaaacaaatgaaacattagtcaggggtggtagcacacacttgtcgtcccagatacttgggaggctgaggcaggaggattgcttgagcccaggagttcaaggctgaagtgagccatgattgtgccactgtactccagcctgggtgacagcaagaccttgtctcttaaaaataaataagaaattccttggaaggaattaagacctgcagtaaatagcatgaggtgatgtacacttctttagtatttcttaatatttgcagagagcttgtctaaattgtgacttagttttccggttagggcctattcctaggttgtttttgcaaagaaagtttttgtgtatgtatgcctagcttttccttatccaatgacctttgtaaagactttgtattctccatctaacgtctagttacttaaggattttctgagcagtttgcttgaagtctgtttttccttcctagccattgacagaaaacacatctgccttagtgaggcccctttgatcttcagagagctttatctaaagagagattaagaataaatctgtcaggcattttcccaaagaaattgaaaatgcttcctaagatttcagatcaggtaggtaaagtgtttctctgaattaagacatacgaaaataagtatgctagtcaatggtttcatcctaagttatagattgcagagatttgcttctggcatgaaggaatattttttatttcacccgagacacaaaatgcatgcagtaatatcaatggccagaagcaactgcttttctttcattcatttttccatatttaacactagcagggtctgtggagaagatactagagagggtccatttgttctcagcctttttggggcttagcatcacaggaagaattttcagctggtctagtttgaatctacatactaaaaatttccaagatccatatgccaacctcctttctcccttcttctctccctcctttaaacaaatatgcacagaatgcttattttctaccaaactctgggttcatactatttactaggagcaaacctaacagataggtataggatctgatacactgtgtgcctcagagatagtcaaggtactaccctgaaaacgtgtacaactatttaaagatctcatgaacaccctcagttttagtatagaaatataaaatttgtaatcaaacaatttaatttttgatacactattttgaccttttaaagagttacagctaagaacagctaatgagctgttaatttagaaaataaaatatatacagaagtctgctttgaggttcttagtcagtaagaaaaccttggggagagaggttaaactaggtacgctggagacttattatgactttggcagtatgaaaggacaggaaacaaaaggaaaatcttacaaagagttatagtctgatttctgaaatgaatgtttacttgaaaggacacagaaaatagggtgccagcaggagaatccagttttccaaattccttttccgaaatcccaggctttttatgaaattttgagagaatggcttaggcttatgttttccattttgagctgcttagaagcaaatatcatataaatgcaaatttctactattatcatttactcaccttgtattatgtgcttaaggagttggagaattcagaagctgtttaatatacaaggcattgcctataaaatatttctttgtgacataatttgcttatttgataaacaagtatctttctttcctcctccttataaacaccccaaattagtttctgagttgaccaacaagattccatcagcatctggcaattattttatctgtttgaggactattggtatatgggacatgagttgctattatttggtaacattttgatgtccttcatttccttaattagtttaggaaaactatttggattttatgtacaagtgcttgctaattacttgagtcgtgagaagactgagtgaggtccaagtgtcctattaatccctttgagtctgaacattttcttataattggtttggcaagaggaataagtgagactagttgctaatgaggagataagtatgtaattttaccatgatataaagctgtgattgtcagtaagtggtattaggaatctagattatttttattagaacttatttctttctgcaaaatcattatcatctcctgatattgtaaattgggttatttcacaccattatttttaatatgtgttaatcctcaaactacaggtacttaaaaccttgctaattaaggagtcattaataaagttagcaatatgagccgtcagtttcgattcttcacaccatttagacgcaattcaattttgcgtatttacactatgttttcagtttggctcagatgtttgaagtaagtcaagagtaagaagtgttgtcaacttcagatccataggccagcttagcttgttttcaagatgaaggactgataacattgtaaagaaacagagaaaatactgcttttcttagccaagaacagagtaagctttgtatggttttactttttatagtctactcggcttttctgttcttaaaagttgcctggttatagtagtttaaaacactctttgggactttatccattgaacttcaatgttctctgaaacaaatattgaagtgttttgcatttgattttgaggaaaggtttattttccttttgaaaataatcaaactctttaagttgttcctaaccatagtcacttttacttgaaggatgcattatagtcttgagcattttttcacttttgtaatcggtatgaccctcttgtgtttttgctgatgagatggtagcagtgctgtggtattgtttgcaggtcctttcttatcctttatctgtgtctccttcccactgtgttgtgggttggtaaatgcatagttccctccattactttttcatggctgaagggattgtaaatattgttttgcatttctagtttttttagatgtccatagaattccatctttagccatagtgcttttataattttgtaatacctttgactagctggggagggggtatagataacagtttagtttccacatattactcattttgtgcaattttattgtgcttctgatatatgcccagtatgctattaggtgctgtgaaggaaatggaaaaaaaattagtaatttttcctgcctgaagaggtttacgatctaattagagggacaaggctaactaaaaagttagaaaacaatacatggtgaagataatgtgttaagatatgttttaaaagaacaaatttatgagattattatgggtgtatcttaatagaataattataactgataatagctggttctacatttaggtaaaaatgattacttccctatgtcaaggcctgaaatacacaggatgttacattttgaattttaaaacaaatcagtatctcattaaactttatggaacaccatgaaactttcaaaatttagaactttaacctagattactgaatttgcatttgaagacactgaggccagtgacgtcctggagtttcaggtctggctaacagtaccagcatgagaacatagggtaacagcaagttgcttgccgtagttttaggtctggcttacagtaccagcatgagaacatggggtaacagtcaggggcttctgagtagttggccgcaggaggtaaagctagtaagcactgctaacataataaaatgaaaggcattgcacacagaccagtggtctgctatttgaccctttcccttcctcctcttctttttccccattttccttttgctgctcttcttccgccatcatcatcagcatcctgacatttgcatggcttcttacgattttgaaattgttttcatatgtacacatttaccggagcatcacaacagccttgtgaggaaggtcagcattgactctgattgaagatgagaaaacacacctgcaaaccagtgaactaatttacaagagtaaatggagcaggacctcaaacccaaatttcctactccaagcctttcactgtacacactgcctcttagaaggctggttccaccccaaatcctttcccaaactggggaatcaattagaagaacaggtagaaaacaaggagtgaagttgtgttcaaatgcttacaataattacttggcttgtaccttttaaaatactttatagatttacttcttcaataatccttgtagatgtgtgtttagtgtattgttaggaattgtatagcatttacaaaagtctaggctggtttaaaccagtagtttgtggagcttttaaaccctgagagaccagcctctagataggactcttgcagtatgtgggacgttggctgtcctaaatgacctccaaaaaggccttttaaatctactccttgcttccatgtgctttattcatgactaccttttatttcctgggtccaggtactaatacatcttgaattatttttttttttccattttatctttctagttaccttccttctacttcttgctgctgcctcctacacagagccctggctcccacagtaggttaatatgtgtaataatgttcagggagtgtgatgaacatgagctgaaaattttagaccaccgtatggtctgcctatatttttctaatttttttttcctctccaaattcgcgtatgttcctagctaccacagcagtgaagggtagtggaaggaatgtggactttggagcccaaatagtttgggctgaaagaccaatcctttcaggctcaaatgcctcgatatttttggacatccacctttaacctgtaaaatgagggtagctgcctgccatgtggtatcatgcgcctgtccctttacctgtcaacttgacatctctaccagatggtgtttttttttttttttttttttttttttttttgagaccgtgtctctctgttgcccaggctggggcgcggtggctcaatctcggctcactgcaacctctgcctcctgggttcaaacagttctcctgcctcagcctcccaagtagtggtggcgtgcgccaccacgaccagctaatttttgtatttttagtagagacggggtttcaccatgttggccaggatggtctcggtctcttgacctcgttgtccgcctgcctcagcctcccaaagtgctgggattacaggtgtgagctactgtgcccggccatctctaccagatgttttaaagacacctcacatccctcctgtccagtaccaaccccagtatctcaccactcagtctctccctccagtcccttggcctacccttgacatgttcattgttctttaattcctttaacagtcttctatcacattggacgtttacctctccctcacactttgtgtcttacctgttaccgtcttgccacctctacttcctacatttctctgtaacccatccatgtctttccacctctaatgtcatcatattcaaattattgccatctcgcacctgggtcattacttctatttttattttttgagacagggtcttactctgtcacccaggctgcagtgcagtggcatgatcatagctcactgcaggctggaactcctgggttcaagcgatcttcctaccacaacctcttcaatggtggggactatataggtgtgcaccatcatacctggctaatgttttaatttttgtagagacagggtctccttatgttgtccaagctggtattgaactcctgggctcaagtgagcctccttcctggcctaccaaaattctggaattgcaggtgtgagccaccgtgtccagccctgacccattgtatcatcctaactgatacccctgcattcacttggtactctcccgtccattttccacatggcaaccaggatgataattttaaaacacatttaatcatgatatcctcttgcttaaagctctttgattccttccccttgttccattctctcccttatgtagaagctgatgactagttagttccagggtctggaacctgaactctccctcctgctctttagtgtcacttgcttcttgttgtcttcaaggcctggcccttccttggatacttgttctcccctctgtctggaagtgctgcttcttgctctctggagccctccccagccctgccccttaactgccccacctattcgcactggttcatagcagctcattctccagtcttcctcctttgagccccctcgggtgtggggctcctccagagcagcgtttccacccttggagcacgtctctctcacttggtgctgcgatgacttgatttcgcaaaaatcaagcaggacaaaggagatgcttcacatcctagttttctttttcctctaacgtcttttctaattgtgaagtttattttgattattaatgtttcattggaaagaaattatttctcattgattgtataaaaatcaaatgacatgattatgttatggccaggttttccccctccagatgaaagtccaggggagaatggtattaaaagtaaataaatttacttaactctcaagtcaagatttatgaatcattgactcaaaagaatgaagtatattatatttgtacaagacagtcttccacagatgcacggtttcatagtggaactgcatttaaaaatcacctgagctgcctctctggctctctgtggcatcatgtggtacttcttattcattgcgacatgggattcctgcccaaaccattaattaaacattttgactttccctttaaaattctgttagcatttagtagctttaatttagttttaaatgctgtttatacttcctgcttattatcttttggtaattaaaacttttcctattcatcatcaaaaagtctgtatttttaaaacccatattttaaaactcaatttaaaacctattttcaaacaatttctctctgttttagattaagtgactaattttctttatattccgtttcactcatgaaaggttttggagagcttcctaaaaggtacgatatgcatatgaaaactgttcctgtgctcttactcttctgatctgctttcaccttttatggctttctttaatgccagtgacttgaacattacacaggattccatcacccacagctgtttgctgtttatacatagacaatatttttcagttgccgttaccgctcctggtcgcatctaacactaccagggctatgtcttcagcaaaaggtgagtggtagttccagtacttcttttcctttaaccagacattactttttcctagattattatgccattgttctcattgtaatctatttctacatttctgccgaatgatacaacttagtgaaatcttctaataccttattaccaaaaagtttggggtcatataggactttatcattattttgtttcagaatacatatgtgttttctacctatgccattgttttttgattctgttaatggtggatttattttatatgttgaaatttagtatttttatatagttaattttgtcagtcactttgtagtgaacttttccaacctcgaattttttcctctgtaaccgttcactgaggctggagtttggtttggatgacctcatccccaggcccagcgattgaccctagtcatacacccagcaaggtggctgactgggaactcaggcctaatctaactagcgggtggtattcgtgactattaagagatgggtgtataactagggcttttggcagtaagtggggaaagaggaactcctctaactggtgaggcatgcaggcctaaggacggagactctgtaggcgtgagggaagccatatggctgaagaagctagcatgtgcaagaagagggcagatttgagagaatggcagagaaatggaacaagactgatcaaatgagtctgattgtgaccttcctctgtactttggaattacatgagccattaaagtacttccttgtttaagctagttgagatttcctatttgtagcttgaaatatcctaacacttcatttttgctttatggttttctccttttttttttttttttttttttttgagccagagtcttgctctgtcgctcaggctggagtgcagcggcgcgatcttggctcagtgcagtctccatctcctggcttcaagccattctcctgcctcagcctcctgagtagctgggattacaggcgtgcgccaccacacctggtgaatttttgtatttttagtagagatggggtttcaccttgttggccaggctggtcttgaactcccgacctcaggtgatccactttggcctcccaaagtgttgggattacacgtgtgagccaccctgctcggcctatggttttgtttctttcttttttctttttttttttttaagagatgggggtctcactctgtccaccaggctggagtgcagtggtgcagtcatagctcgctgcaacctcaaactcttgggcttaagggattctcctgcctcagcctccttagtagctgggacttcagcacacactaccacacccagctaatttttaatttttttgtggagatagagtcccactatgttgttcaggcttgtcccgaacctctagcttaaagtgaacctcccacctcagactcccaaagcacagggattacaggtgtgaggtaccacacctggcctgctttatggttttttatatataaaacgtatcatgagaagttggatggaaattttatctgtatttcctcttactgatttgttcgtttcacaggtgtttgaatccttacatacagtgttttgtcctatggtgtgtgttagagatctgcctttactttttttcctaaacagtttcccatatgtattgaattatatccttcctattgatttgcaacatactccttaggaaactttaggctgttggtgaattttctgttttgttccactaatctgtctttaaatcactgtatcagtaaaaaattataaagtattatccttttgtaatatattttaatgttttcagggaaaatatccctcattattttcctgaagtttcatggccattacctcccctttattctttgggattaatttgggagttattttatgttttatgaaataacttcttggagttttgattagaagtttataaattttataaatgatgagagtgttgacttattttttgagatagattcactccatcccttttaatgtattttaggcataatatattattagtgctcttataaatgagagcttcattttcttatttttcaatttggggaaaatttttgagaacataactatggtaattattagaaaaataacctaggagtatcatatttacatattctctttaaatatattcaactttaaaaataactttatttttaaagttgcatattcagttatcacaaattttatgtgtatctataagtctttttgcatttgtgtgggcctttttctttgttcttgatcaatgttgctggaggtttattgattttattagactttccaaagaatcaaaggttttattgaattattgaatctttatttatttttgctcttttattatttccttgattctacctgattcatgtttatactgtcgttcctttcctaattgttaaatttgttgaatttgatgcttagcttgtttattttcagcctatattcttttatcatttgaacatttaaatgtgtacgtttttttctaatcacttgctgcttagttccaatatatggtgtttttattatttttcatgtatactttagctttatgatttcttctttaatcagtggattatttagaaatgtgtttttatgtgaaaaatgtcataatgttttttgaaatactgatttctaacttgattgcattgtgcttagaggacttgaggtgtattaaactgattgtttagaacttgttgagactgacttcatggtccagtatgtggtcacttttcataaatgtttcacatttgcataagcatatctattgttcaggctgggtgtggcagctcacacctgttgtaatcctagcactttgggaggctgaggagggcggatcacttgaggtcaggagttcgagaccatcctggccaacgtggcaaaaccccgtctctaccaaaaacataaaaattagccaggcctggtggtgtgtgcctgtagtcccagctacttgggaggctgaggcaggagaatcgattgaacccgggaggtagaggttgcagtgagccgatattgtgccactgcactccagcctgggtgacagggtgagactgtgtctcaaaaaaaaaaaaaaaaaaaaaaagaatatctattgtccaattggtggatacagggctctaaaaatatctgttaatcatattgtctaaattgtcaatatatttaatgattgtttttgctctgattagcaattagtgagatatgttaaaattacttcactaaggccaggcatggtggctcacgcctgtaatcccagcactttgggaggtcgaggtggggggatcatgaggtcaggagttcgagaccagcctgggcaacatagtgaaaccctatttctactaaaaatacaaaatttagctgggcatggtggcgtgtgcatgtagtcctagctactcaggaagttgaggcaggagaattgcttgaaactgggaggcagaggttgaagtgagccaagatcgtgccactgcactctggcttgggcatcagagcgagagtccatctcaaaaaaaaaaaaaaattttttttttcattaaatgagagacctctaattttctcctagttctttcaattttttctttatatgctttgaagctatgttattaggtactgtgataggcagaataatgccccctcacctgtccacgcccaaagtaaagatgtctacatcccaatcgtcagaacctgtgaatatgtccctttacatggcaaaggggaattaagatagcagaaggaattaagcttgctgatcatttcgttttcaaatacagagctaatcttggattatccaggtgggtccagtataatcacaagtccttaatgtgaaagaagtaggcagaagaagagtggtgtgacatgagaaggattcagcaggtcattgctggctgtgaagatggaagggggcgtgaaagctagcggtatcaacacagagtggctcatgtgaaaacctaaggaaatggagccgcgaggccatgaagaaggcgccctcgtgcacatatgctcatgtaggaactactggaagaacttccgtgttccggataagctgcctgcctcctgcacatacgctcatgtaggaactactggaagaacttccgtgttccagataagctgcctgcctcgtgcacatacgctcatgtaggaactaccggaagaacttcggtgttcccgataagctgcctgcccatggacacttgcctccttccagctcctgcaaccagagagctttgtctcaagacagctcatgtggacttctcattttttccttttaaaagcttctcttgtctcagcctgtttggatatacctatgggtctgccatagcgtgcatatggattgtagtcccctgctattcctgaataaactgttttggaaagccagtctctcgtttattttacgttgacaggggctatgagtcaaaggatgcagggagcctctagaagcttgaacaggtgaggaaatggattcatctctagagcttctggaaagaaaggcagctttgttggttgtagccagtgacgctggcatcggacttccagttagtgtttctctggtacatctttcttccttcttttaaccttctttctgttggtatccttgtgttttaagtgtgtctctggtaagcattatgtatgtgcattatgtatatagattttgaattttttacctattctgacaatacttgttttaaatcagagaatttcaaagagttatacttactatgattactaatacatttggaattatttgaattatttttaccattttattttgtcctttcactttttaaaactattttacttaaaaaattttaagaggcaatttaaaaagttgttttttgggcaataatcctttacagtaggtatttttattccactttgcagctgagaaaactaagacacagagggttaagtaacttgttcaagatcacacaattagtgtgtggcagaagctggacttgaactctgttcatctgactgtagtgactgcatatcatcctggtacagtttcgtttattgagtgtgatagatttaaaaaaggcagaattgtcagtcaaggatgtgccgatgtcttcgatgtactcctctagatatgccctctacacgctgttctgtgctcccagagtctgacctctttggactgttagtgagcctcctgcctggtggctaccaactgggtccagccagtgagaaacgagggcaaagaattaggtccaggtatttattctgacccttgaaccacccttccttcccacatacaagcccttcctgtgtacagggttacctcagggctcactgtgtcccttgggaaaggtcacggctcgtgtcagggaccctgtccactctgtcctctcagcatctagtttctgcttccctgctcttatgccttaaggcctaggggtgcaaacagcagttgtcatttgctccagggcatggcattatttggttttactaaactgtcctaccttttgtgaaattccctttattaaatgctttccaaattatccctgttgattgcacagtctgttttctgccaggactctgactgatacagtgagaaaggaatgcttaatcaaatcagccgtcctttatggaaataaattattaaagccctgcctcacatcaaaaagcaaagcttgaaaaaaatataataagggattaataatcaaaacatataaaaatgtcaaacatctattaaagaaaaaaggcaagccatgcaaaagtaaagttcagggacatatcctaccagacattgtaaagctataggaataaaatagggtaatactggtgtgtaaaaaacacatagttttacagtctattcatcgatcagataccttaaactacctacctactaacaacaattaaaaatattagaggagagatgtaaaaaactattgaaaatgtatttctgaccaggcaagagaagacggaattggcagggtgaaaaagggcaagccagactctagggagggcagcgagctcttagactgccttcaccgtctttctgaactcaagggccgggagtgtctgctttgatggctgcatgggactccggagataggcaataaagcccatggtttctacaaagtgggaagctccaagatttattgctgaataaatctggaaccctaaagtccgtaatgtaaaaggtgaatgagaaagaaatctctgcgcagaagagagaaggaaacaagccttaactcactggagtagcaaggaaagcgcttctctgagaattgatgaccaccagagggcctcccacaggtcttccctgcacattcctgctatcctactggggaggtccaaaacaacctccagcaaacaattcaacgtggtcttcaagtagttgtgtacccaggcaactggcaaaaacaaatacaactcctctctggaggaaagcagcttccacccaatattcaaggcattactgaaggcaacaaaacaggaaaacaggtaaaggattctcaggcaactcacaggacataaaatgtacatcttgattacgaaataatctgtgtaataagcttagaaaattgcctgacacgtaataagtgctaagtaaacgttagctatgatgatgctggtgacaacaatgatgatttcaagtctttttaattctctcctattaattgatttctcttgctttgttaaaatcacaccagtttaattaacacttgtcatattgtaaactttttaaaatgttcaaattttttcattgttctttttagaagttttcttacatattttatgtgagttttaggattggcttgtcaagttcctgaaaaatcatgtttgaattttgatgaggataggggttacctttatagattactttgttaaaaactgacatctttacagtattgagtcctagcatttctgaatagagtatatcttttagtttattcaggcttcttttatgtcctttagtcaagttttatagttgtcttcataaagatcttgccacctttttttagttttatacccacttttccatttatgttgctctttcctattaaatgcttaaattggctatattgaagatgtaagaaggctgttgagttttgtgttcaccttgtatgttttgcgcttgccaaaatcccttactttttctgattgcctctgattttctaggtgaataatcatattgtttgtaaattgtgataatcatttccttgtgaatatttctgtctctaaatttttatcttattgcaatccctgcaccactacaatgcgggattttaacaagtggaacagatatccttgttttcttcttcattttaatggatgcttctaatattttaccattaaatgtaatattttctctaaatttttgatatataccttttatcagaatttgctaagcatttttgttaggaatgggtgttcagtactattagatgatatttatttcagtctctgatagttacatgatgtttctcctttaatacatgactatagtaaattcattggaacatttcttttttctcctctttatcattaaaatgtttatatatacgttggataagctctacatggccataatacttgtctaacattttaaaatttatttttagtttttaactaatacataatagttggacatatttatggggtacatgtgatattttgatatacgcatatgatgtgtaataaatcagggtaattgggatatctgtcacctcaaacatttatcatttctgtgtgttggggatactccaaatattctcttgcagctatttaagaaatgccttacttcagtatatgtgaggggttgattccagggtcccctgtataaccaaaatcgaagcatgctccagtccacaggtggccctgccaaacccacggatacaaaatttcaccttctgtatccatgaattcacatccctccaatactgtacagttttgtaggatttgaactgcatgggtccatgtatacacacattttttttcaaccaaacatagatcgaaaatacatattcactggatgcgaaacctacatatatgggggctgacttgttgaatatgaggttccacaaggccgacttcgggacatgagtgtgtgaggatttcggtaaacatgagggtcctggaactagttccccatgtagaccgaggaacggctatattttcagtttggttggaaaaatatccttgtataagtggatcctggcagttcaaaccagagttgttcaaggattaactgtacaatagttaactatggtctcctgccagtgctgttgaacactagaacttattcctttcctctaactgtggttttgtatccataaccaacctcgcctcacactttcctctcccctgcccttcctagcctctgggaaacactgttgcactcactacctccacaagatcggttttttttagctcccacataggagtgagaacatgggatatttgtctttctgggcctgactttcgcttaatgtcctccagttataaacgtgttgctgcaaatgacagcatttcattttttcagtggctgaatagtattcctttgtggaagcataacatattttgtttgttcattcatctgttgatgagcatttagcttgattccatatcttggctattgtgaatggagctgtagtaaacgtgggactgcaggtcatctgtttgatagactaatttcctttcttttgggtatatacccagcagcggaattgctagatcatatggcagttctattttccatttctggaggaccctccatactgttttccataatagttctgccaatttacattctcaccaagaccgtatgaacattctttttctctgcatcctagccagcatttgttattttctgtctttttgataatagctatcatatctggggtgagatgaaatctcactgtggttttgatttgcgtttcttaatgactagtgatattgagcattttttccctagacgtggtggccatttgcaggtcttcttttgagaaatgtctcttcagatactttgcccatttaaaaatcagattatttgcttatttgcgattgagttgtttgagttcagtgctgggttccaccgtggcagggctaacacctagttccaatgccaagtcccacactcactttgctttccctaccccaagcataggtgttttccctccaggctgtgctgcctggggatgaggtaccagggtgtaggtaatgtgagactgtcttccctacccctttaaatgcatcttttcttgttaagctaaaaccaggtcctgtcatctcccatctgatttttagctgttatgaaaatgctttcttgtatggatagttgttcattttgatgtttgtgctgaggggatgatctttggagggttttttttttttttttttttttgagccatcttgctccacctttctctctggtaatttttaaactttatttaaaaatgttccatctatattcataagtgctattcccacgtaagtgtgttttcttattatatttatgaatccaactatggtggctttctaaaacatcttaggtttttaaaaaatcttattctttgtcccgttaggacagtttatataatattggttttatctattttttgaagatttgaaaaactcttcattaaaaccatctatgcctagtgcttttaggacactattaggacagtttatataatattggacagtttatataatattggttttatctattttttgaagatctgaaaaactcttcattaaaatcatctatgcttagtgcttttttcccccctgagttaaattattacctgtaattttgatttcttctatggttatttggtcttttgttttcttttttcttatgaaaattttagaacattcttctagtatctgttttgcttagcttttaatgttaattaaaattatatggagttaaattttaaatctttaatatctgaggttgttttcttttccatttctattgtactttatttggatcttctttcttttttcttagttagacttggcaaaacttagccagttttatgggtcatttcaaagaacctgggtttcaaatgtgctggtatttttgtttggttttctaattcatttctttttttatgtctaataatttattctactttcctgtttggttttgtttttacccccctaattttgtaagttataaactaagtttacttattttcaatctcttgtgttttctggtaaatgcattttatgctatgattttttctgaccctgctgtggctgtttcccagtctttattttgtgcgctttatttgttatgtatgtatgatgaaaatggaaatttttcttcagtttttttttcttcatcccaaagcacaagtaaggcgttaaatttcaataggtagatagatgtagagatagtagatttttagccacgttttaattttatcctattacatttattttaaaagatttggaagacttgtatttttttaatttgtaaatatatccttttgtcctaaaacttagataatttttgtgaacattccacatgtttgataagagggtgcattactctctgcctctcttaactgtcttattctctaccagtttatcttatataaatattaaaactattattacatgtgtaaaggttatatttgctttgctaagattgtattagctatctttttatggtctggaacagaggttggcaattttttcttgtaatgggccggatggcttctgtcaaaaccactcagctcgccattgtgttgtgaaagtcgccttacacaatatgtaaatgcaagtgcagctctgttccaataaaattttatttacaaaaacatgtggcaggctagaattggcccactggtcttagtgtgccagctcctggtcagcataagccttatgacactctgaaatttagatattaagtttatgtaatatcgtatatgtctgttaaccttttgggtagtaatttgttgaaaaacatacaactttacccattattttggtatttctggtattctcccttttgaatcactatggaaaatccttatttttctaaaccatcgtacttaacattaatgcttgtattctcaacaagcacaatattgtgaaaattggtttgggtcaggaggaggaaaaaaaaatcttagaaattgcaatggctgtgcatggtggctcattctggtaatcccagcactttaggaggccaaggtaaacagatcacctgagcccaggagttcgagaccagcttgggcaacgtggtgaagccctgttactacaaaacaaacaaacaaacacccaaaaaattagccaggcatggtagcttgcacctgtagtcccagctattcggaagactgaggtgggaggatcagttgatcccaggaaattgaggctgcagtgagctgtgatcatgcccctgcattgcagcctgggcaacagagcaagaccccatctcaaaaaaaaaaaaaaaaaaaaaagaaaaggaattacagtgtcttgtggctctccaaagctcagcccaacaaaatcataccttagcatttatttacaagcggagggtgttgagcaaggcaggttcctttgggggttgataatgaaaaataggtaaggtattcaagtttattaatgtaatgctcttttaagtgtttgtagcatctgtgtctgtggtattgttgctacacattttgcttactcctacttttgcaatttgtattttctgtaattcttattagactagaggcttgtttcccccacacctttcaaagaagtctcttggtctaatttttcagttcaactcttgtgcagattcatctctttaccttttatctttactttgccattgctgtgtgttttccgatgcctttaattgaatgactaatttgttttctgcctcccgttccctctgccactcctcctccccaattttatgctgtgtcttttcctctaattataaatctgggtttatttgcttttttcttttcttttctgtgctttctctttctttaacttctttttttgatatgcagcgtccttactgtcgttattttctaaagattttgtaattgcttgtttggcttctttgagacacgatttaatattagtggaggatttttaaaacatttcccttctttagctatttttggtttgtatttttgtcctgaatttcagtttttattgcattatcttcagaggctgtgatccttataattaatcttcttttgacttgaggcttagtttgtggcaacatatgtcatcaagttttctaagtcttccatgatcacaaaatgatagttgaagtcccttacaatgctcatcagctaggatgctttcagcttcaggtaatgaaaaaccaactgaaaatggcttgaatagaaagaacatttattatctacataagaagtcctggagtagggtaattttagaggttgttaactgggggcctcagtagcatcatcaaaaacctacattcaattcttccctactcaatctgacagcttggacttgtctcataggctggctgtcctcagggtctcaggatgacactcacatgagaggttgcatgtcccctttctagcacttctctctttcccttcattcctccctccgtgtgtgtgtgtgtgtgtgtgtgtgtgtgtgtcattcacagaagtttctcttagatccacagctctttcaatgagtggaatggtgttacatgtccattcttaaaccagtcgttgggaatgatatcaccaggggtagtagagtgcaatgttgattcatggcttgagggccagtccaggctagcgatacagagtgggtaatattctctccctgcagacatagcccctggacccaagtgaacagaatcagagttctcactgaatttaaggctaggggtgggtgcaggcaggtacagggaaggcagttaggcaggcaccagtagtatcatctgcacagttgaatactttattagccataacaatgtgcaaacaatccacacacttcatttgggatatttattccttcaggtgtaacttaagcatcttttttgactctaaacaattgagcgtattgtggaaattttccggtgatttttgtcttaaataagtaattgctgcagcgctgaaaattattactataaaattctactcctgttagtatatcagatatatatatttttaccattttctttataattcagaattttaggattttgagcagccagacattgtgttgtctttattgttcttccagcactgagtgctgaatttccagaaacgaatggtaataatgaaaggtgcatatctggagatagatggaagtgtaactcaagatgtgattagctacccagtttgtttttattaaaatgttatttttttctgcatatttgtaattcagggaaagtttctaatgtgaaaaataaagtagcttttcttaaggcaacgtataaaaaataattggtttaacagcattgtgtgaatacagatgagatggtcctattaaaatttgatcacaaagtatacatggtaaatgcagcaagattcatgctaactaattactatttcaagtttggagtaaaatgctgaattatgggatgctgtaatgtcactaatgagtcctgtcatggagaaatgatattgccaattacacataaaatagtcaaaggctaatacatttggagaattgtcaagatgggtttttttttcccctcgtgcttactggttatgtgtttgcatttttgttgagagaatacacagaaatgatctactgtcacttgctttcaagctggaattattctcttcatatttaggcgtaggtaccaattaagtgaaaagaaatctgtcttaagtgaaactatggactactagtatagtgtatcttgtagctgtttaatgttgtaactgctaggttctttactttgcatccaggtaatgtaatgtgaatgatggattattaagttcttttcataggaaataggcatattttaagttaatagtccttatcactgataccaattagccgaagagaaatgaattccctggatttacatttcttaatagttctttcaggattgctttgttacttttgaggaaggtgtatgaaatttggcctaggcactgtatccggtgtgaaataaatttatgcattcaataagtatttattgagtgcctgtgatatgccagtcattcctgtgttctgtatatcattttaaagattaccattcgttttcttctgatatttctttaaacatcttattttttgtgtcaagaacttaccatatagaattctgtgacttcccgccacttccatttagctttatatcaaggatagaattcagtatgaacacatgaagacctgcatgcttaaacagactaattgaaatggttgaatgggtaagaaaatgctcccttgaatccacatccttaaatgaggccaggcagacttggaggggtctgtgagcccctgagctcctgtcttacagtctcaggctattggagggggctgcacatcccacatttgggtagatgcccaaattctccttttagtatatactctcccttttcttgggtgttcttggaactctggtagaagacagggagaatgatagattttccttgccctccacagacacaggcaaactagtttctgttaggcattcactctgtgtaacattcatcccaattgcaatggtgatacagctaccgtcaacagactgatcaccttgcctgtgccatgtgccctgtgcacatttactctagtcttcacagtaacctccagagaggtgttatcccattttatagattacagccgaaaaaggttaaggaccttgtcactgaactgcccagtagaagttcaagcatatgctcatggaatttgattttacggaagtatgtaccctttagggatctacagttaggtgccctctagggtgtctagaattgctgaggagcccatcgttccttaagcacctgtgctgcgttgtattgtaatcacctgagggtgctttaaagactatgaataatactcagactttcttctccaaccatttacatcagagcatctgggggtggaacccaggcatcagtattttgcaaagttcccaaacgatgtcagtgtttagccaaatatgagacccactggtttagagctgtaaacagtgcagttgctactgttttatggtagatgttacagaaatatgtcgttgaattgcctataaaatgaattaaagattggagcatttctttttcccctattcataaaccattgtgatcgcagtcttctatagaaattacctattttgcctgatgagatttacttagaaagggaaataaacacatagctatatctctcctgaagtcttcttgcagttactaattaaggcagtacacacattctcagttgagctagaactttagctattgtctctttgctctactgaaggtaacccgagtgttacggctttttaaatgagctggaacaataaatacaaatttcgttggcaagacaaatactttttctcatatgccaacgattatgtaatcaaagtataaagtatccatataaagccttgcttttgaaaataatttcaatttaaaaattaaaaatagtaattaacattggtaacagtatattgatgaccactgtttagctgatacagtgaatacaggtgttcatataaaacatcatttaaaatcgtctatccatatggaacacattacgttttcttccaatttacattgacttcctgttggtttctgaatacaactcaaggtgttaatttcgttttcaaagccagatgttatttggcaggataaaacttaaatttcccctaatagatatttttaggcacttaggatgctagggaacttagtaagtgctttttaaaatctagagcattttcaaaatgctcctttctgttcagtctttcttctctgctaaaattgttatgtgctaggggagatttgtgaattttagagtaatatctttaagaagcctgacagagtagatcgagaccatcctggctaacacggtgaaaccccgtctctactaaaaatagaaaaaattagccaggcatggtggcaggcacctgtagtcccagctactcaggaggctgaggcaggagaatggcgtgaaccggcaaggtggagcttgcggtgagccgagatcacgccaccacactccaacctgggcgacagagcgagactccgtctcaaaaaaatacaaaaacaaaaacaacaaaaaaacctgacggatgtcagtgaaattgggggatactaaataaagagtggacagcagtggcggggcaacaagcagttcttcagtgttcctgttcctcagcgtagccaacttggtcctgtatctccacagttcacaggtaacaagtgccctgttgcttcctggttgactgatgctctctctgttacataacatccctgacaacctgttaagtttgtaattattgaacaaagtcccacctcattggcaataatggcaaacagaacgatgcagctgtttagcttgctcttgattgaacagaggacataagttggctgttagttgactaatgactaaaattttgataaagataagaaaacactaggcatttgagattcatgtaataagtagcttatgcatgtactgtattcaaagagaagatttattttatttttttatttttctattttttgagacggagtcttgctctctcgcccaggctggagtgcagtggcgtgatctctgctcactgcaaggtctgcctcccgggttcacaccattctcctgcctcagcctccccagtagctgggactacaggtgcccgccaccaagcctggctaatttttttgtatttttactagagacggagtttcaccgtgttagccaggatggtctcgatctcctgacctcataatcctcacacctcggcctcccaaagtactgagattacaggcgtcaaccaccatgcctggctgaagagaagatttagatatatgtctgtctgtccatccatctccctacccttcatctaactgtccattcaggacatttcttcacagctaaactctacctcagtttttaatctttaagtccagagctcagtccattgatttactgtattcatcagattttaatggatgcttatagttttgttctcaaagaaaattaaaaatattacttctagtgtggtgtgctgttctcactgcagagtactgtttgttttgtttttaatttacatatatttactaggaagtgcccacactgataaaacagtcagtagtaatcaagaaatgtgactttcttgcactattatttaactaaaggaaagcagaattatagaaaagaatgttaggaatgttatcttcatgagtcagggcttttgcaatgctaggccttctcactttcaatttctctcttgcaaggttaaaagaattattcttgtgttaactcacaattactgcatttgatcatcctttctcacttatgacatagcttctatgacttatggaacattggatttgctatagtagaccagtctgaatctgtctctacatggaatgaccagattgaattggcaccaaagttccactacaaatccttcatccagtcttccagtttgaattggaaatatcaattcaagcagctcacaagtcatcaaatgtttcagtggttttgtatagccagaacaggcagaagaatatgttcctgtatagacagttcattgaaacagtttattctgtattatacctaggtgagttttgaaaagtcagattttttttttaaggtaaactctgatctcatttatttagaagtcagacatgttccaagaacctagaggaaagcaaagtgaaacctccctcctccccactgccccaacattcaaaatagctattataaagccattttttatttcattaggaaaacttttaggagcttttattttgagtcagtgtttctattttatatatagttttaataacttttgttattttaatccagattaaagatagcaatttagagatgggtagagcaggtcattagaaatgatacgggtatcctacctggaacagagtgaagaaattttagtcttgggacatttagggtggtggcaaataactctgcagtgtaacagcgcttgaatacaatgatgacttgtaagggtatcaacattatgggaagacagtgttagaaattacagatttgtgaaagaattttttttgttttcattttctgagaaatagatatggggtgcacagtgatgttatgtatgaagtgtgggatgattgaattagctcattaacatattcatcaccttaagtacttagcatttattgttcctgtctaactgcaactaccaacccttcctcatctcccaacaattatgttttatatactctgttaaagaagtcagagaatatattgggaaaacactgaagtggttccaattttaacattgtgtttgagagcaaatgtttgttaagttttggctaattaggtcacctcattggttgattatgctgtgtaactgagggatttctacacacggtttatttgttaaaaacttaatgtgtataagaagtgatgtgaggatttctttacacttctgctcccatggtttcaaatgtgtctccttctctctatctgcaaccatgacctccctcttgagttacaagccattatttcttatgggttaacagttagtgcagctgttatctcctgtcagaaccataaacctggtgttgattccttcatctaatttcttcaatttgtctctctaaagtgctgttactctggggtattccctgtcttggttgatgacagatgccaccatccgtcagtctctgaagcttgaaactgcagtgtaacagcgcttttcttagttgcacatcctcctgatcatgcattgtcatgaatccctcagaactgtcatttcagcgaggcccctttctgttctgagctggaaagcataatggttctttttttttttttttttttttttgaagcggagtctcgctctgccacccaggctggagtgcagtgttgcaatctcggctcattgcagcctctgcctctcaggctcaggtgattctcctgcctcagcctcctgagtagctgggattacagcctgtgtgacgccacactggagtaatttttgtatttttagtagagatgaagttttgccatgttgcccaggcaagtcttgaacacccagcctcaagagatcctcccgcctcagcctcccaaagtgctgggattacaggcgtgagccactgctctgggctggaaaacttggctctgatgctgtccctgtgttcaggctctttgcaacattgatgaaattactcttcttaaaaacaaaagtaatgatgtcatgcttcccataaagactgtcaccaactactccgtgtggttcctgcgtcagtcttcagtgttagctccctccctgccctctccacatgccacgaggcgagacagcaagtgctcctttgtcctcgtggacccagttctaccacagctctctgcctttgcacgagctggtcccgtggcctgggtgctcctacaaaacgctagagccaggaagagagatgccagcggtctcctgagttaataccgtattctaacgaagatctgtttcacacttttcaaagcttcagttcacagattccagaagaattttgcatacaactagaacatacttatcttttctcagtggcccgtcactataacattaaataagatcttaattgtaaaacacacttaagtgatacactttttcccaggagagagctgataacggtctttaagagcttggaccctggagatgcgtagtgtggtcttgaattcctgctctggtgctgagcagctgtatgcctttaacttctctgtcactgctgcctcctcattgaaatgaggctagcagtgggacctgtctcgtgggatcgctggagggtcagataagttagcatatctgaggctcccaggatagtgtctggtgtggaagcatgtgtatgttttagctgctgttattatcattagtttcaattccctggcaatagcactgtttggagtctcactgtgtattatttaacagattctgaataaagccattttatcttctttttattctttatagatgataaataatgttcctacaactcgaggtatcacgctgtgtttttaactttttttttttttagcattactgaaagaagttgtatgtactttatcttattttgctccctaattataaaatacagggaaaatcatattcttttgcatgaacaaatgagctatttgaaacaggttgcttggtgaaagtgaaaatttaaaacaggattcaggtcaagtataatatattggtttacacttaacagagttcatagtgatttttatatgtctcctttctttttgatgaagaatgtctgtgttccgactactttacttctccgttcattttcatttgttacattctgaaagcataaaacgtgccattggttaatcaatttagtctagtggaggtacacaaattcaaggtaaatttggctaatttctcctgcaggctagaagataaaatcctttccccccaccacagttaggttagtagtgcttgacgtgatcagatgcctcttcagaggtcacctgatttaattgtggttgtgaagcagccaatccaaatccccatattttaatttctatccctccacattctcggcacagaataattaagagtatagtttttgcttatgtcatttatccagtgaaaaatgttcctaataaatacgtgacagttaaaattgttctagagaagaatgtttattaacagacaagacagtgcttattgccacagcatcattttaatctaagacttaactaaaaagagaaactctttttagttagaagaatgctccaacaaggctgttaccactcagcgaaggcaatggttactcttttattttttaaattggtttgcccctaaggtaggcattcccagggctaaaactgtgaaataaaatgtacgcaaggggactggtgcttatagatttgtgtgtataaatgtagtatttgtgggaaatgtcaagctatgtactcttctttaccttttattttctcctagatgatgtttatcagtctttttgtagctgtctgctgcagacatcattgcgtctttattatgaaagtgctatgtgtagctttccagtcattgctattcgagagtgagtttgtgaagcagcaggagagagatgattttgcaaattgcaatataataccatatatgatcttgtctcaacctgtaacacacacatcttcacagaaataacatttaattatggtaatatcctccctgatatcagacacagtatggcgcctgttaagattatattgtttgtagtaagatggagtaaaagaggtttaaaaatgaaagaataaaatcacataccttgataaaccccttagatgctatttaggccatggagagcttttgattttgtttcctttctttcttcccaaaataaaaacgcacacaataatttgacagacaaacactgtcacacactgtaaccccatctaatcccctcactgcacatcttaatccctgatggacttttctcagctatgtgggctatgaggttagggagtttctggatgtgatactttttccaaagtttcccagtgacagatgcagtgaccttatcacggagacagctttatgcagtttgacagttcagccatctggcttgtatcgattataattgatttaaagaaactaacactccaaaagttggccacttaaaaccctaaggctaaattggtctacatttaatttgaagtttcaaaactttattcttaaaactaatttgggcctctttgtaaaattcagccaacttcttttctgtgtggggttttggggtgaaaacactcaaagcctgccttgaaaaaagtcaacttttatgagaactaaagacgacatgtgtactcatagacatagattttatctcttcttagattttgctagagtttaaaacttaggtagacttcggttctaggacttcaaaaagtttagaaacttttaggctagtttctttatttaccagccttctagacgtgagctcattacctgaccttttagagtcttggttttctcatctataaaatgaatgatgatagtagctttctcattgcatttttgggagtattaaatgatacatgttaagtgcttaacacattgcctagtatattgtgggtaataaagatttattttactaatgattactgctacaaattagtagctaccattgatagctattacttcttcctttcttggttttccatctgtcggcttcctcttgttttcctccaatatcacagacacagttgcttagtcttgtatgtgtttcttcagctctctgcatatttgttaccggaatgtctcagaatgttgcctgtaggcctcatcttttttttttttttcccctttactccctccatatacattctcatccacaatcaagacttcagcatgttcttgtatgctgatgagttccacatggtcatttccaactgaagtctcttttttgggctcatctgaaaggcatttcttatcctgctacatgacactttaggggacccagtgggcataagggcaagtaagcatcaatttgggaatgaatactattgatctggcactaacttttattggttgattggtaagaatttgcagaaatctaaagtttaattaaaattttgttttatactttgtgttttaaaatctgatgttgcatatcacactgtaatacaaatgcattcagtaaagtgtgccctttctacaactcttgattttaatgtagttactggaattatttgtttggaaaaacctggctttctgaatagctgaaattttacgcatttcagcaataatggtgtccttaagatcgacatctttccggattcattttttgtattgatttaattcaacaatcatttgtgcaacagtaacttgcttacaatgccttctcaggcactaacttgctatattaaaatagaatttattaactgaccattccttaatgacttagccattttttgtgtgttttttttaattgtcagatgtatgccacataaagaaaagtattaaaaatgtgtagtatggtgtaaagaatagcaaagttgagctccaaactacccaacttcaggttaacaacattgccagtgtcttagaagccccatgtgttcctctctcattgtttccgtctctctcagcctcagaggtaaacacgtcaggtttgctagctcttctttatggactaaccaccccattgttgttttgcataaagcagtgtattgttgttttaaaaatggagtaacttgtatacccatcgctgtgtaagggcacggcagtgttgccactgcaggctactataagaagagaaacggagctgagtctgggtcatagccgggcctgtttttccctggagtttaccaaagccccttctgtggaagttagtggccaagggcaagaatgggtcctgggaaacacagggcttagcatagtccgaacaactaacagggctgttttgagggtcatgtgtcacatgtctgacagaagtatgtttgtaagttcactatgagtagatcaaagtgggccattatagggtgaaaggaatgtcctcagctgatagtgacatcaaggcagggctgggaattgacggagatagagtgggaactccattaacaggtgattaggacaagtagccataggagtcctggtcaggctcactggggtgtcttgtcttcaggttaaaaaggtggttgggtgggtgagtggggtttagggggggtctggtgacagccctcaacttgtctatcgagtcacattgccgaaatgtgggcctattctctctatatctgttgtttagctctgatcctgtgatcacatttctctgtgttttgaggattccatttgcttcttatttgtactgagtctcctttcttatatcccctattttctccttcttggactactcttgtgttagtggaacatgtcatctggtatcttaaaacgtcatgagaaatgcattctttgagatcttgtaaattcaaaaatgtagacattttttctaccctctttcttagatttactgggtagagaattcttggtgggaaataattttcctcacttatttgaaagtattgctccattgacttcttgcttccagtgttgctgttgagaagttaagagtcattctgctttctcattattcttatgtgatcttgctgtttttctctgattatttgtaagaatttctgttttctccagtgttttgaaatttcacaatgatacagctaattgtagatctcattttcctttgtgctcggtactcagtggattctttaaacttggaaacaaatttcttttatttctaagaaggcttctagagtcatttcattaatgacttcatcctttaattttttcctctcctttctttctaagactcctgtttggaagttttgcctcctatactagtcctctgtttttcatgttttttttcattttttattttttgacattttactttctgggagatttcattttccaactgatattattttcttctatcatgttaattattaagaattctttttcttcttgcagcatcctattcttatttaatagatgaagcattttttaatatctgataattttaatgatagattttttgaagttttctctgcatactttcttctttattactgttttgatttctaacttctctgttaaaggcttttcttagatgactgttcattgtatatgtgcttataatgcaaagtggcagactaaaacattgaaagtcttgagcatgcagattaaagatctgggcatattatttcattgcagggtgatctgcttgagctcttttcttggggtaacttttgtcagtatcttttcttagtatctttagagaattcctcttggactgattagattccttagggaagactccttcagttttctgcttggctattaactgtttttactattcttccctctgttttctccaacttgctctttccaacttgctatgggctagggaatcaggaaaaagaaaaaaaaaaactgatcaggacagtttcaaagtagaacagttaggttccgagtgacagcctaagggattggcctgtgcgtaaaatgctttaatgtgtggaatttatgacattgattttgatgacccaggagcatgtttttatttcgtgctcctgattatattgtggaaaggtgatttagtcatacaacagaattctaagtagatgaagtattaatgcaaactgttatagagtatttgtttttcttaatccatttcatttgatccactgtgtgtacttttccagttgattataaattgatttgttcattaatttgttctagttactggtccataattatcataatgtttttattttttgttgaagtatgtgcagtattttggactttttccagttatgatggactatcagtatgttctcacaagtaatgggacactgtattttacaaatatttattactcttgatgttctctaagattctgtattatgagctcttgttgatttacagacatttggaaatgtaactatttgattcttattcttggttaatgttttatcctcctagaccaaaggtgtttattctttagaactttatatgtttgttttaacagctggatttctagtgataggcaaacttttaacaaaaattccaattacatataagcttactgccatttgatttctataattaaaaatattaatattattagtggggtttagtcagtcactatattagacaaacgtgtgagttagaaattcaggtgtacacaaggattattaattggggcttcttcaaagaattttgacattagtaaaatttttcttttttttcaaaatgtttcaaagatttttttttaattaattaattaatttatttttagacaaagtcttgcttaaagtcttgctcttggccaccaggctggagtgcagtggcagaatctcggctcactgcaacctctgcctcctgggttcaagctattctcttgcctcagcctcccgagtaggtgggattacaggtgcctaccaccatgcctggctaatttttgtattttttgtagagatggggtttccctatgttggccaggctgatcttgaactcctgacctcaggtgatccaccgccttggcctcccaaagtgctgggattacaggcgtgaaccgccattcccagccaggatgatttatttttaatagcacccctaatgtatttaaagcatgattgcacatacaaaatttggatttacatacattttcagaactacccgttttgtgtaagtatacacttatattttttaattttaaaaatattaaaattttgacaattttatgtgttattggggtaccgtttggtattttgctatgtgtttacaatgtggaatgagtatatcaggctaattaacaacacatttcttacacgtgagagggctgttttttagaaatcagcttcagcttttgattttctgaatgaccttgagcaaattgttttcttgttctgtaacatacttttcttggccataaaattgagatgaagatgttaatgctgatctaaccaaatgattttgatattatagggattaatgaactgtttgtaaaatattttgttgttcttggaattacttacactggtgatgttattaatattatgtactatgttcacagtggactaatgatgccattgtattagctaatgttttagattacttttaattaaaattgtatggagacattggtgtgcttgctgcaatcttgtcctcctctgcaaatggcaagggagtattatcacaaaatatttaaattatacataaattcaaggtttttaagaatttgtcaactccctggaagaagaagaagtaagaaattactcattaagactcaggaatctcagcatccctatttggaagaattggattatttggcttatttataaatttcaaaatgatacattttcagctaatgatgattgaatcttgtcagacaccttacacaactgtgaacattccacaagttaagaaaacaacttcaggtggggtgtggtggctcatgcccataatctcaacaagttttgaggccaagcaggaggattgcttgagcccaggagtttgagaccagccgggcaatatagtgagaaccttcctctataaaaagttaaaaaattagccagttgtgatggtgttacttatagtcctagctactcagtaggctgaggtgggaggaacactagagaccaggggtttgaggctgcagtacgctatgaccatgccactgcactccagcctgggtgatagagccagaccttcatatcttaaaaaaacaaaacaaaatgcatttatagtaccattaataagaatgatatacttaagagtaaactttaaaaagttcaagactagtacactgaaaattttaaaatattgttaaatcgaagatgtaagtaaatggaaaggcgtgatgtgtttatggattggaagacttaataatgttaaaatatgtagataaaggcaaggcatggtggctcatgcccgtaatcctagcactttgggaggccgaggtgggcggatcacgaggtcaggagtttgagaccaacttgaccaacatggtgaaaccctgtctctactaaaaatacaaaaattagccgggcatggtggcacgtgcctgtagtctcagctactcgggaggctgaggcaggagaattgcttgaacccgggaggcagaggttgtagtgagccaagatcgcgccattgcactccagcctgggcaacagagcgagactccttctcaaaaaaaaaccaaaaaaattatatatatatatatgtgtgtgtgtgtgtgtgtgtgtgtgtgtgtagataaaacacaattcatatcaaaatcccagctggatgctgctgttgttgtcgttgttgttgttgttgttgttgttgttgcagaatttgaccagctgatcttaaaaccacacagtgataatacaagggacccagaatggccaaacagtattgaaaaagaagatcaaagttggaggactcatattttccaatttcaaacttactttaaagctactataatcaagatgctgtggtactggcataaagaaagacatatatgttggtggaatagaattgagaatctagaaatctttacatttaatagtcaattgattttccagaagaatgctattaagacggttaaactgggtaagaatagtcttgtcagcaaattgtgctgggacaactggatatctacaagaaaagaatgtttagatccctacctcacagcatatgcagaaattaactcaaagtgcattatagctaaaactatgaaactctcagaggaaaacattggagtaaatcttcattaccttgggttaggcagttgtttcttagacattacactaaaagcacaaacaacagaaggaaaaaaaaaaaaccatacttggctggtgggggatgtaaaatggtgcaaccactttggaaaacagcctggcagttcctgaaaatgttaaaatacaattaatatatgacctagcaattctactcctagttatgtacccaagaaaaatgaaaacataaatccctgcaaaaactagtttccaaatgtaatggagataggcagtcagtaaacaaaatatataaaatgcccagtggtgatacaactcctgatgtttcatttcattctttttctatatggtaagcccccttgactattagaaaaattgtacttaaaaaatatagcttgtacatacttcgtcagaataaagtaggaatgttacttttttcataatctcttttaggtcaattgaatattttaaaatatatctgtttttgttttgctaattaaacctatttttttttgatctagggtttacaatacacatctgtaatttattgttcaactgactgagactgggtttcactctgtcacccagtttagagtgcagttgcatgatgagaggtaactgcagcctcaaaccccttggctcaaggaatccaatcctcctgcctctgcctcccaagtagctaggactacaggtgcatgccacatctggccagtttttgaaatctttttgcagggatggggtctcactctgttgcttcagctggtctcaaactcctaggctcaagcaaacctcccacctaggcctcccatagtgctatggtgataggcatgagccactgcacttggcttattgtttatcttaatatatctcttcacataaaatatagtatgcttaaaatagtatatagttggcccttgaaaacatgggtttgaattgcatgggtccacttgtatgctgatttttttcaataaataaactcggccctctatgtctgtgaattctgcatccacaaccaaaagtggctcaaaaatacagtattcctgggatgcaaaacctgtagatgtggagaactgaccttttgagtatgcacattctgcagggacaactgcaggacttgagtatgcttggatttagtagccatgggaggtcctggaaccaatcccctttgaataccaagggaagactgttgcttttatttcttccttcctgccccttgtgcaattactgttatgcattttatatttatttttatgtttgttataagctctacaatacatttttatttttgctttttactgtcagttttctcttaaatttaaaaataagaaaaaaattcatttgtagacacccacatttaccattcatcatattctttatttctttttgtagatgcaagttttcatctgacaacactttctctttgccaaaagaacttcttgtagcttttcttgcagttcacatcttctgacaactagttctctcagattttgtttgcttgaaaaaaattttggtactatttttgaatgacattttcattgtatgtaggattccagggtgatagttttatttattttttcctgaactttgaagatgttcttctattgtcttctggcttatattgtgtctgatgaaaagtcagtaatcactcttacctattccctgtgtaagttgtattttttccctttgtttgcttctatttatcactagttatcaggaattttctttgttattattctcttttgggtttcgtcttttaaatatatggtttcatgctttcataaaatataatttgccaaatttttaacattgtattttcaaatgctttactctcttgactctgatgactctgatgtactttgatgacatgcatattatattatcatattatattgtttgctgttttccctttttactgagagtgtttatttcttacagtcttcctccccctgctccccaaccttcagtttatgtagctgctcttgtgttgtattcagattcactgatcttttcttctcctatatttatatgcatttaactatatccagggagtattccagttcaggtgttgtatttttcaactccagatgtttgattttttcctatactttatttaaatacattacatgtcttgtttttttttttaaataaacacacacatttattcatttgaattccttccttattaattccatcatctctatcattgctatatctgtttatatagtctaatttttctcttggttaagggctgcattttcctttagagggtatttgtttttatttttgtgggaagctaccttacaagtatgtcaacttagtctcttcaagccggggttttgagttttgtttggtgggtgaactgtgtattatcatatggtttgtttagccctaatcccggtacctggtcttctagggtgtctgctgaatgccctaggtgtttactgaagttccagtgggactctaatgtcttcaacactgtgtgtacttcagcatttacccagcttagttctctctagtagttgtcgttttttgtgttgtctcttgaaatctcaccctacacatgtgcagcgtagtattcagacaaaaaccaaggggacctgtatgcggatttctggacctctttctttgtagaactccttctgtttttgtattctcccttcaaattgctctgatctctgtgttgtcatgtaacaagaccattgtgcttttttggggtagccagtacctacagcatggtgcagtaaatgctcggaataatagtctagtgtcaggaaaccattgtttcccatattctgctttctggttgttgactgcaggaaggactgatctagtgctagttactccacagtggctgacagtcccctctgtattattatttaacctgttattttatagtccattaatgcagaaatgtttccatccttgctgtactctcatgtccacaacaaagcctgacacattctaagtggttagtagccatttactgagtgctgtatgcagtagattatctctccctttctcctgcatggtcaaatttttccttcagtgcgggactccctccaattagcattggaatatgtgttagtctccctttgtcttaaaccgccatatctggacctgcccttatctaattcccaacctgcttcagtgttgctttcatccagcagttccattgcaataatattcacaagtgttattgatgactcccctatggtttaaacctatctcggtcttaatctcacttgattcctggtggcatttgacactgctgactgtcctggaatcctcttttcccttactttcctgaccccatattttctacttattttccttctggctgtccctttgtctgtctggcttctgtttctctgaccaggcataaactgctactgatagtcagggtgttgtccattgtccttgttgttctacaaactgttgccttgtaatctcgtaattaccatccagaagctggtgttttctgaatatttttttttctggtttcagattcatgtggacagttggctgttgacttctctgtccctgaagctctcaaaagtatgccccaaattaagctaatcattactctttcctctctgacatcatcattcttcttcttcttcttctttttttttttttttttgagacagaatcttgccctgttgccctggctggagtgcagtggtgtgtgatcttggctcactgtaacctctacctcctcggttcaaacaattctcctgcctcagcctcctgagtagctgggattacagctgcccgccaccatgcctgactaattgttgtatttttagtagagatggggttttaccatgttggccaggctggtctcgaactcctgacctcaaatgatatacccgcctgggcctcccaaagtgttgggattacaggtgtgagccaccccgcccagccttacatcatcattcttgagattgcaatttagatagctctaatttcaagagacctttcctgattcttcaaagtgttctgtaccttttccatcttgacacttcgaaccctagtattgaaattgccttgtagtgcattggcattgccccaaacctgtttatttccctcactaggcgtgaaattctttgaaggcaggaatggctgctatcagtaggtgctcaataagtatttggggatggataaatgaaggaatgaatgatattataggaagtgagtattttattcagtgcaggatttagtttgtttttctgctcttaaaggataaacatatctgcactgttttaatagaatgttctagtaatatctgtggcagtgatggtgggtcatagcaggcaggcagcagttgtgaactcagcatatcagggcagcctaaggaaggtggggtgtgtgtgtgtgtgtgcgtgtgtgtgtgtgtatgtatgtacatgcgtgtgatactcagacacacagacatccatccatcttaaggtgtcagaatattaagtaagattaagttgtgttagacaatggagtcttacacagtgacttgacccccaggataccacttctgttacagatgcttggggaggggtcctctggtttttctgtttgtgctggatttctaatattcatgataggagcttctcaacctaatcctggagccggagctgcttgggtttgaatcccagctctgccaacatgtgacctcaggcaaataccgttacttttctgtgtgtgtttcctcagttgtaagacagggtaatgataatacacaccttcttagaggtaatgtctgtaaagcaattaaagggtgcctggcacgtgataattgctatgtaggggcttattaaatacaaccacaatgtttggggccgttgtgttacctccattttacagttcccaaagtgagacccaaatagctgagtgttacgaagtgtccctccagtagcagagctggtctgtctgtctctgggcccctcttcctcaactgtgcttacctgcatcttcactcaacacttaacctctgtttaatgtcacagggcaggctcagagagcagcagccagacatgggtgttttctaccttcggccctgcagaggatttctgtaagaaaagcagcatgacagagagagccccccaggacatacagaaaatgagtacttagagtctaaattatagagaatggaatgttaagtcagtggttctcagttcagactgcacgttagaatcacctagtgggcttttaaaatatacagatgccagggcttcaccccagactcattaaatgaaggtctccgagtcatgaataacatcggtgggtgggggccaaggactttccagagctccccaggtagttcagatatgcagccatggttgacaaccattgacttagaactgggagggggctcccttattctcttgttcctccagtgtttcctaagcgtcgaccttatcaaaagtaggtctgacagtgtgttcccagtgcctggacctggatattttttacttcagctttaattcaaaccattatgtgctgctagtcactgtggtgtgggagcagcagtgcacaaggtggtgaggaagccagcctgcctcaaggagtttaacatttcctaggaaagcagtgtctgaatacttagatgattctataactgacttgcacagacgttctgctgtcacagtaggtattactgaataatgtggctgctccaagttttttagttatgttccatgtagttgtgagtcactgccaaggcactcggtcttctaaagggtctctgaaaaatcactgacgtgaggcggattaataggcaaaaaggcatgggatttatttaatgtttgtacatgggagccctcagaatgaagacccaaaccccaaatgaggaacagaaacttctgtgcacttttgaggttacagaaagaatacaggctcagagaatggcccaagacaggttttagtggcaagacaagtaatgggagggaagaaggggggaggcttggctagcaaaggtggtcttattatacagatgaaacctcagagatagcagttctcagagagaacagatgatagatgtttcttttcagacgtttaaaggctgcagactctcagtctctcctacatccaagacaggcctggatacgttcatggagattctctgtagatgtaaattaccccaacaaaagatggcattccagaggtgtttctgtctgctggccctgcagccgccatttcaaaatatgtcaaattaaaatattttgatttccttccgtgggaagccatcagaacaagaagagatgagatcaaacagcaaagaattgccctggctgctgtcttgaagagtgtagggggacgagggtgaaaatggaggctgtcacagcagactagacaaatggtgacagtggcttgggccagggtggcaggggcatctttgagagtagagccagcaggattaggattccacggtctgagaaaggaaccaaggacgactccatgttacacttgtttctgctcaccatagtctgtgttaataggtgatttagaatttcatattttccttcttgggtacttacaagataatttagtacttctgaaaacttttctatagttagattatttttgctttctttttagatgcagaataatatctacctatttacgtgtgttgagattttgcatttgatttcagtgctaaagattttagataaagctccaattcaaaaataacctgaattcttggaagtttaaattacttaaagttcaataagttgattatttaggtcattttacttactttagtgctttacattaaaattttcctgtttaatgaacatttaactaattaggaaaatttattagtcaaattgtcagactctgttaaatggcttgtcaaaatgtttgtttagcagttattcctgtcttcttaacattgttgatctttctaaccctctagttcagttttttctgggtgattgtgttaagtggtagtatttaccaattattttaaaaatcctttattatgaaaataagtcactgtggacagttaaagcataaaaagtttaaagaagcaaaaaataagcatacaaaatcaaccattattttaccattcttaggcagccactgttttttttgttttttgtttttttttaactttttagagcaattttaggttcacagcaaaattgagtagctggtacactgatatctcgtatgtctcctgcccctgcacgtgcacagcctcctccatgatcaccatcccccaccggagtggtatgttgcaaccattgatgagcctgtattgacaccaggatcacctgaagtccatactttacattagaattcactcttgatattgtacattctctgggtgtgggtgaatttatgaggtgtgtattcatcatcacagtttcctacagagtcctttcactgcccttaaaatcctctgacctctgcatagttatctcttccctctaacccctggcaaccacacgtcttttaactgtctctgtagttttgccttttgcagaatgtcgtatcattgggatcatacagaatatagacttttcagactgataactttcacatagtaatatttattgtttcctccctgtgttttcatagctcatttgtttgataactcacttgttttcagtgctgagtaatattccattgtgtggctatatcaaagtttatgtattcacctaatgaagaatatcttggttgcttccaagttttcgcaattatgaataaaactggcataaacatctgtgtgcaggtttttgtatgtggaaataagttttccatttctttgggtgaataccaaggagtgtggatcatatggtacgggtatgtttcgttttgtaagaagccaccaggctgtcctcagaagtgactgtaacattttacatccccagcagcaatgactgagaattcccattgctccgcatcctctttaccatttggtgttgtctggattttggccattctagtgatatgttgttgttgatgaagtatctattaaggtctttggctcattttttaattggttgtttgaagcaactacttttaaaggtattatttccttcctgtctttttatttttatgcttttttatgtgagtggttgagatttggggtaaatattccatctgttttttttccatttaacgtcacgatgaaatctttttctgttttgttaaagtgcattatgtcattgtaacaggtatgtaattataatgagatttgacattcacctattcttagaaattttggttctttctacctttgcaaaattataaacaatattgccattgagatgattgtgcctgaaaacctcccctgtgttttgtgttgttttcttagagcatatcctagaagctaagtgactggtttggagaacagagacatttttgagggtctttaaacatattatgagattactttccaatgtttatattaataaaaatactagcagctaacagttactgagctctatgtctgtgacagacactagatttagtctttcagatgtttttcagttctcccagcaccactgtgggtggacttaggacagttcttgttttatgggtggagaaactgaagcctagaaagatggtaaaagtggccaataagagacagtaataatgacagagtcgaataaagagatatgctatatagaggaagactattttttaaatttcggttattctcaagttgatttacagtgttaacagagttccaaacaaaatcccttaattaaggtaaaatatagacgttaatatttatcaactttttggatgatgtttttaaatttcagtgcaatagaagaaatcatataagacacaaagaagaattaagactgatgtggccaacagatgaaggaatggcaaacaatataaagaaaatatccatatttaaattgttttaaattattagtgggcatttttattctatacagttcgtaatagttttaaaataatttcaacttttattttagattaaaggtatacatgtgcaaatttgttatgtgggtctgttgcgtgatcctgaggtttagggtacagatgagcccatcacccaggtagtgagtgtggtgcccagcaggttttataacttttcagtctagtcccacccacccttagtagtccccagtgtctgttgttcacatctttatatccatgtgtactcagtatctagctctcatttatacgtaaggatatgtggtatttgtttttctgttcttgcattaatttgcctaggatagtggcctctagctgcagccatcttgctgcaaaagacaagattttattctcttttatggctgtgtaatattccatggtgtgttcctaccatgttctctttattcagtccaccattgataggcacctaggttgattccatgtctgtactgttgtgatggaaaatattcatatttcagaagtaaggaaagaagagagggacgacaagacaggttatcagtgtttcagagcaaatgtctttagactgcctgtctcatggagtttgtatgtttttactctaaatctccagtctgatttttgtgtataggagatttacaatggacatttctgcattttagaagtagactatgttgtacagtctcctgttatttcttgggtgtgtctttatgtgtgaatttgtgttttctgttgatgaaacaagaaaaaatatatacttaaaacacccaaatatatctgtagataatttacatatcagttgatgaactattactgtttttgatagaaaatccatgtggcttaagcaagggaaaggtttgtttctctcttaaatgtagagaggtagatagtccagggttggtttggcggtcccacagccattaggacttgggcgtctttgtcagtcactgctcgccattcacctcgtgtgtctcgtcactgtcctaggtcagtgctctagtctgactatgatgcatttcagcatgcacgaaggaggagagtagtagatgaaaatgggcaggagtggaagggagcatatgcttagctgtcatttaaggaggtttctgaatattgccaagtagtacttagaccccgtctccttgaccagaactgtaggtacgtggaacaaggtacattgttttatgcccagctgaaaatcaggatttgtattactaaagagaaatgagagaatggatattgggcagtgtaacaatctttgccccatcacgcgtgcatgcgtgcatgcgtgcgctctctctctctttctctctttcactcatttaagtgtgacaagagcaaaagaaacatttctaatacaaatcagaacaataatcacttgggcccttttctctgctgaatgtaaagttttcataatgaggcattattaggcttggagggtgcctttggcactagagttcccttgacatcatccaagatattctgcgggtagaaggagcaggtgagagaagcggggaggctggtcttggtggggaggagacaagacctggaggtgcagtcaattctcattctgctgttttgagcaaccttctgaagaagagcagggctgtgcaactgaatactgactctgagcccattgtgaccctgctgagagaacacctctaggaggaaagagttctgtattttagaaaaagaagaaaattcgttcttcttttgttgtgtctatattaaattcagaaagaagtaaggctgaccagcaagacttgggagggcacaaattacatccttctgaattgctaagcacaggtccatgtgataggcacttagtaattactttaatgacagtgatgagatggtgctaaaactatcataatttctaactctgtaacttcatgaatgattttatttaaaaacacacactgtcctttttaatttatgcttacagttgtatttgtgatcaaatcaagtgttctctataatctagaatgtactcttaaaatagtagacttctcttatgctccaaaatttaaaactgaaggaacaagtaactttcgtgttttagtatttggaagtcatttcagaatcatataaggaggttagccaaagagaaatgttgatgtaaattttgctttgtacattttgtgccatttttcaactcgattttactgctgaaattacacatgcattatttaaaaatcccagtggtacagtctcaaagacataaatcaccttattttgatcagtttttgaagattgaaacaaaactaatgaaaaatattcttcactaatgaaaaatattcttcactatgtggaagagatttagctgaaatttttcgtttttgacctttgaaaatgttcatgtagtataattagggctttctgcacatgtcatttctttgctaattgttttatacttatagttcatcagatgagagctaaagtgttaaatcttcaatgcatgaagttgaaaatgtaagaaaattgtagaactcacctttgttcctgttctttaattcagaagatattttctttttttttttttggtatactcaaaaatatacatttgcatgtatataaacatatatacatgcacatacatttacacacctatataatgtataacatatagaggttatatattatgtgatatatacatagtatgtataccatcaatttataatacacatatatactatgtttacttatacatgcagctgtagatcataggatacacagacaaaccccaggaatggcagctacctatgtcataccatcctgctgggtgatgcttttcatattcttttaaccaacaactaacttttataatttgaattactttgtcacaggctaattattgaaagtataggtaatttttaggtgttctacttaaagagctattttttactgagtgtattttaaaaaattattatgaaatcttttatgaaactattctcctgattactaaatgaaatatttttagagcttccatgacctcttaaggaattcattttctggtgtgctactaacagtattttcacaaaatgctttaagcatacattaattaggttgtaatagtcttttggatgaattatgtgtttgtataaatgataatttggaaaagttcatggaagtctgatgtgaagaactctattgtttgacaacagtttgaaagatactgagtattagacatttttactttaaaagaaatggagacaaaatcattcaaaggaacgcactcacttaagaattcattaactgtaatagactttatcacccattatttggggacatgaaaaagtgctcatttcaagggtattaagtgccatgttgggtcagatctgcctgctgttctcagatgttgataaccagatactttatctttttggtgaggtgatgagtgtgtgtgccttttattgtgttatctcagaagattagggttataagcaaacattcctgatttttctctgtagtctgtattttatacattattcataaatgtatgaaaatcattactgaacctagttacatttttagtctgaaccatttctggaaggaatttcctaagctttctgaaaaaagtagcagcatgtggtgtgataggaagctgtattattaggtttataagagtgcccagtaattcacgcatgttcatcattatgtaaaaatttcagttattccctatttattattcattttgtagagcactaatgtttaatctgttttcatgttgaatgcatatcctcttaattattttagctgatttttgtctagtgtacttcatttcctcttgagctatacctttgtaaattctgtagagtattagagagagagatgcatcatggttctacagaacagaaactcaagtagtgttttgtgtttttactcctcttcctggcaatactcaacacttttgcttgcttcctgcaggaatgtattgacctgttgcattaggaaatagcccacaacgacttagggagccaggcacatatcacttttcatgacttgcagctcagagcctgtcccgcctagagtaaggtggaggtataattttggatgtgttgctgcaggttgtccatgttgatgcccaccattgttctgctaaggctttcagctgttctgtgttgtatcatctgttcgccttgaattgtattgccactagtgcttcctttttccagcacaggtaaagaattgcctgtgcatttcctctcctaggtcatcattacataagaccattttaatacctcacactatagttaaaattgctctttctggaaaacaaattcctttttattatggtatctttagcccattctcagtgactaagtcttttttctcagtttaatggtaattcatttgaagttttttgtgtttgtttttgtgacttctctctctttagtggagaagcttaccagaagtacttaaagagccaattaagttacagttttaggcccttattttgtcaaagcatttatttttcaaagtgttttagtaagatatttatagtttttatgtttgtttcccctagaagataagatgagcttatatagcatacccagtttgagtatgaggcaggaaaatacattgtttagaggtgaataatttattttgtactattctttctgcagataaaattagtaatatgtattaaaaattttaaagcatgagccttttctcttcaggacattgatctgggaaataattttatgaataatatctcaaaaacacaggcaacaaaagtaaaaataaatgggattatttcaaactcaaaagcttctgcacagcaaaggaaacaacagaatgaaaagacaacctacagaatgggagaacatatttgcaaactgttcatctcaaagggaactaatatccagaatgtactaggaacttaaacatctgaacagaaaaaaaaaagaaagattaaaaaatgagcaaatgatctgaacacacatttctcaaaataatacatatacatgagcaacaaatatatgaaaagtatgctcaacatcactaatcagggaaatgcaaataaaaaaccacaataagatatcatctcatcccagataggatggccattattaaaaagacaaaaaaaaacatgctggcaatgatacggagaaaagggaactcttacacactatgcaggaaagtaaactagtatggtcactatggagagcagagtggaagctcctccagcaatcccactactgggcatttatccagaggaaaggaaatcagtttatcaaagagatacctgcacttctgtgtttattgtagcactgttcacaatatacaagatatggaagtaacccatgtccaacaacagatgaatggataaaaaatgtgctatatatatgcaatggaatacgctattcagccataaaaaaaaaaaggaagtcctgtcatttgagacaacagggatggaactggagggcattatgtttcttgaaataagccaggaacagaaagttaaacaccacatatgttctcatatgcagaagctaaaaagaagttgatttcatagaagtcaaaagtagaacagagaataggagggttgaaggaagagtgggggatagggagagagttgttaaaggatatgaaactccagctagataggaagaatcagttcaagtcttccatagcactgtagggtggctatcattaacaatgattatggtttaaatatgtaggagggtattgactgttcccaacacaaagaagtgataaatgtttgagatgatgaattatgctaattacccattactatatattgtaatgtatcaaaacattactgtgtaccccatacatatatatgattattatgtgtcaaataaaaataaaagtgtgagccttgctacccaacaattacacttttggggatttgttgtatgaaataagagtaacaacaataatagtcaacatttctgtattgcttgctatgttttgggcatgatttaaagcatttgacatacatgtacttacctaactcattgaaatcctgtgagtaggtactgttataccagttttataaagaaattgaggcagagaagattaagtgatttgtccagttttagtctgtctctgttacatccagagatacgcataaaaaatatgtagaggattagtaattttaaatccatttatatttccacaatagaggttatcattaaataagaggagactcatataatagaattctatgaggagataaaaacggcaagtctagccttctgtaatgctaaacttataagaagtataattctattttagtaaaaaggatgttagtatacatatattgaatgcaaatattgtgtgtataaactagaaagccatgcaagagaatattaatagtactgatgaactctggatattgggattaggagtgattttatttgtgcatatgtttttctattttacagtgctttttcattgagcacattctgcatttgggaaagaaaggttatttaaagttgttcttattaaagttactgcatttaattctgtttttgccattgtgtcaggcaagtaaaaatgctagatatcaagttaccagaatcttctctggagcccttcctctgggggttacatgtatatgctgcctgtcttttggaatagtgatttgtaagtgacatggtttaagggtttggaccaacaggttcatagtttcaccctgctttcttttagagctgctggataaattctgtccggtttcaatgatttatctatatttaggttgtcaacctaggtaagaacatcctgtgcagctctctgtttgctctattgagtccttgtatggttatcttgttagtatagtgctaatgataacaggctgtgtgtaaaagctctctgtacacagctgtcgaactctgctgtgtttggtggtgcagactacaccctgaatcctgttaaagaaaacctttgagatcataacaggatgtttggaagttttaatataaatctcttacttatatcaaaagcagttgaagcaaatagtcttaaaatatagtagaattctaatgtatctgacctgcttccttaagaattcagtttggctatggtaatctctgcaatcttctccttaaataaaaactgaaacattaagtctgccccttttctttaatccctgttcaagagggtatgtcgatacttgaacccttttaccagcatttaaagaaccagctgctgctggcatagcatgtctgagattgcattttgtcctgcctacctttttattagaccttgcacagccatatttgtgagtggattagtttcctgtttttgccataataaattaccacaaattgaccagtttaaaacaacactcatttatcatttcccagttttgtaggtcataagtctaggtaaggtatggctgcactaagcctctgccctctcacaaggccaaaatcaaggtgctggtagggctgtctatgttcctttctggaatctctgaggatgagtcttcttccaaacttactagaattgcctgagttcagtttctttgattgtcggatggaagcctccatcttctgccagctcttggccaggggctggtctttgcccatgaggctgctcacatcccttcgtgttttccatgtgaccctgtccagcaagagcagcttgagagccattcaagggaatcttttacttcccttctgctacatctttctgctttaagagatcatgtgattagattggggccagccaagtaatccagagtaagctccctactacatttgaaagtaccttttgctttgtaaagtaacagattcatgggttccagggatccggaacatggacatcttttgggggccactctgcctaccacagtgagcctgttctcatgtatacaaacatactctttctatctgtttagcactacagtggatacccagaccataagcgtcatagtcctgacacacgagttggtaaaaaactaactgggaacttgtgataagcacttatgttagtgttttaggagtttaaaggaaagaaaaattagtgaagatggaaaatagcaaaggccttatagaggaggaagcacgtgaatttcgcccttgaagactactgtggattcgatagtctaatgattgaggagttacagaagtgggggaagaacttgatcaacttgaacaaataggatgtaggattgggcctgatgtgtttaatgtgatagcagagaggcgatattaattaggaggaagtagtaaggaataaaatatacagttgtacaaggtttggagaggcatgcagtggaatttcaatttgaattcctgaaaagggattttagttcaccaagatttgagcgagatagtaatataggaaataagtgtttcataaagatgagtctgggagtgatctgcaggacagagagaaggtggagaagatggagttagccaggtgagcatacgatatggggtttgggccaccacaatcaggcatcttcttatttagatcatcttaaatcttgacttcataggattgttaccatttcaaaacataggctttaagtgactacttcattaactccttcattcaccttactatctttggttttattgtatacaataacttttttttttgaggccctggtgttaatcagaatgatgcatctttctcctctgtcaggctttcagtgcttcacatacttttcagatagtcttcagaactccttcaggacagagagaactgcttttcctatatgaatatagagagagctaaaaattcagaaatttgaagtgattatatgaggatcacccagcatgtcagtgtctccagtagaagtgaaattccagtctttaattcggagacaatgcccaatcactgtggctactcttagaaacaatttaagagaatcttcagacccacagcttaaaataactcacgtacatggcataaaataaatacttgggagttccttggatgcagggtgtttgtcttgattatcttgggtgccccttcagcttattatgggtcctggctcatagaaggagccctgatatgtttattaaatcagggattgatgattgggaccacctgggctgacctttgaacgacttcttacttcctatagtcttcaaaactgccagaggctggggggatagttgacaaaccgggggacgtgctatcctaatctgcagaggtgctatcctaaatcactgaccaattccagctttaaggttcacagaaccttttgaaaaacatgatctggttttaaaattgtttccgtgttgatccattttgatggggggtgaggttcgctattcacatcagtgagtatggccagcctttgtctgcggagatctgattagtttgttaaattcaaagtagcattttagacatgatttcagtaaaggttaggggcactctttggctcttaaattttaatagttttataaaaaccctcttcaagacaaagttgtaatttaatacaaaatcgtaaattggtaaacctgtaacatttgtatcatgaaacaggtgatgtaactgaagattaaataaatgtaaaaaatttagatattgcttttgaattggaaatggcaatatttgtatatttttgacaaagcttgaaggagcaaaatctcatgataaacactatatgcaattgacctgaatgatgtaatgttaaagagccactgcagaagcatttgcaaatcataaattaaagagctctttctcaattaacagttacagatgtcttctcagtgcagggaagtgtgctagggactgcatcctagagatacagtctgtgctggcatagggcttctaacctagtggaggtgacacagatacaggatgtagtttccaaagtagtctaccacgggtccagcgagagcatgcaaacattattaacacagggtaagttaccactgagtgctagattagtggattaaaatgacctttctacccctctctgcctggtgaacggctgctaatctttcaatgttagctaaagctcctaagactcctgtagacggtctttttcgaccccatacagcctttattctctgcggtactcaatgtgcgctgctttccaagcatttgtgatacctcaatgggcatagtctaccagaatgagtgcaggatggggaagtctgggactcccagcctcccagagcacaagaaaaacttgtaactgtcagaaatcagaattaatcgattaataatagcaaatattaagtaacaaatattaaggttaattttttaaatattctaccagccaatttagtctctttgttctaatttcatcttcaccaagcagtcttatggttgtacatttggttttctacccccttatgtggcaaaaatattgctgtgattgtggttatagcccctgctgtcagcttgagacttgatgtctgtacattctcctttgagtctggatccttgatcctggcctgtgattccatctcaggagttagaagcctgtggtgcctggcctgagtcagctcattagcttcattgacaacattggttcgttcaacaaatattgcctgagaagaagacatttaagcaaagacctgcaggaaggaagggagttaactaagtggatatgtggggcaagaacttcccagaatgaagaaacacccgcattaattgcttgaggtatgagaggtgaggtcaggggcaccagtttgtatagggctttctaaaacattatttggagtcagatgacaagctatagaggatgctgagtcaaggtggaaacaacaaaatcctacttaggttttaacaaaattactgtggttgcggtgttgagaatagtgagatggtggcaaggatggaagcggggagatcaattagggggctgtttaaatgatccaaacaaaagataatgaggtaattggatcaggtgatagcagtacagatggcaggaagtataggattggggaatatattttaaaggctatgccaaacaggccttactgacagatgggttatggagtgtgtgtgtgtatgtgcgcgctcatgtacacttgtacatgtacctgtaaataaaggagagaaagaacagacaaaggataaccccaacgtttttagttgagaaattgtgttttcacacacactgagatggggaaactgagagcagcatgtttgatagtcaacgttaggagctcacctttagacatgttcactttgagaagtctgttaggtagccagaaggaactgttgcacaggcatttcgatgtacaaatctggagttatactctgtagaggtccagattagaaaaaaaattggagggtcatcaatctaacaaaaggtttaaaaactgtgggaatgtactgggtgcagtgagtcacatctgtaatcccagcagaaatgaagatcatgctgtaagagagtgggattacaattgacctccccatgtctcaggttccacatgcacagattcaaccaattgtggatcagaaataggtggaaaaaaaccaatacaacaatagaaataatacaagtaaaaaaatataactatttacgtagcatttacactgtattaggtactataagtaacccagtgatgattggaagtgtacaggaggatgtgcatgggttatttgtaaatactatgccatttcctatctgggacttgagcatctgaggttttgggtattcttggtgggccctggaaccaatgcccgtggatcccaagggatgactgtatgcctgtacgtgatgatgggcctctctccatgaatttaagtcaccaggactgggtttggggagtgtcagctcattttctgcctgtttatcagcagacacagatggggtagttttctcacttgcacctacggaaaatcctccttgctcctggggttgtttgactcagtgtctcccttttcttgtgtctgggaggttgatggcatagtacatttactccccaagtagtctgtgagtgtggttggttaaggtggctgaactgaactcggcatctcccagcaccaccaacctggaaagtgtttttggtaggtgctgtgtgtacaacatccttctgattgcaaaggcctgtactctagcattaggtcgggttaattcctgtcaggtcttttttttctcttagagccccatttctaatgaagggattaatttggcaggtgatatcaacttgcaagccaaatttagagttgattttccaaatgacttctcccaaatgccctattatttcctgtctccattgtaaaatatttcttcttcctggaattctctaactccctcttctttgagaaataaaaaaatatcaattttagtgtaataatttgtcttatttaattttgttacttaaatatcattcacattttaccaagcacttaaaatttggataggaatagagattgagataatatagctctactctcaggtaattcacattgtgggccaggcgccgtggctcacacctgtaatcttagcactttgggaggctgaggcaggtggaatcacctgaggtcgggagtttgagaccagcctaaccaacatgcagaaaccctgtctctactaaaaatacaaaattagcggggtgtgatggtgcatgccggtaatcccagctattcaggagctgaggcaggagaattgcttgaacccaggaggtggaggttgctgtgagccgagatcgcatcactgaactccagcctgggagacagagcgagactccgtcgcaaaaaaagaaaaaaaaaaatcacactgtgacctttataggatatctttttactgtccagttttacatataatttaccatggattttttaattaggatacctattttattgtaatctggcaatatttttcacatattggagataatttttgaagtcagttctttgtctatgatatattataacttccatttaataatcattggttttagattggaattgtgtcagctccctttctataacatatagtttccatgtataaagtaatctgagtatatatcttatgtgtgagtgtgtctctgaatttttttcattgcagatagtttggtggaattctatttttagttatgttttttctccatcactttgcttgggaacgctggatgaagtggttactttcatttctctttttcaccatcatgattgtttcctgcagtcccatttatttttgtcaagtttttcttcatgccatcaatctgtctcatttgtgtatctgttctgtttctttttcttttttcacagctgcgaagagccatggatggtcttttatttggttggttttcattcctgatgcatatacaaaccactagagtatgcatttttgaatcttatatatatcttccagatttagctttatattatgaagatatttgtcatttgggcagctgagaaaggctttttccttgagacactctctgcttaccttttataatgttcagacaggaggttgtcagttaacttgctataaatctaccttcagcttcagtgtgatataattatataagttctattattaatgatgcatttctggtttggtctgctcttgatagtgctagtggtcaccagccctgctattttggcatttatagtgagcacatatcttctgataattatatttctcttttataaaatgttttatatacacatttcttttaatgtgtcagcatagcaaatattttccaaatgtccacaacgtctgaggcattgttgtaagcaatgggaatgctatggtaaataagatgccatatacaaattacattctagtgtgggagagagacagcaagtaagaaagacacttgatagagctgcagagtgttgagtactgtgaagaacacgaagcgcgatgtgaacgtggagatgaaggcatgtgctgtggtcatggaaggccttttgggggaagtgactttcaagcagagacctgattgatatgatgccatgaagggcagtttagggaagggagcagcaagtcaagaggccctgaggctggagtgtctcagggccagcaagaaggtcagagtgcctggatgatagttggctagtgggtgagtggtaggagttgaggctggatcatagccagttagagggtgagtggtaggagatgaggttggatgatagtcagctagggggtgagtggtgggaggtgaggttggagggatagccggttagcaggtgagtggtgggaggtgaggctggatgatagccaactagggggtgagtggtaggaggtaaggttggatgatagctagggggtgagtagtggtaggtgaggttggatcatagccagctagagggtgaatgttaggaggtaaggttggatgatagtcagctagggggtgagtggtgggaggtgaggctggatgatagtcagctagagagtgaatggtaggaggtaaggttggatcatggccagctagggggtgaatggtaggaggtaaagttggatgatagctagcgggtgagtggtgggaggtgaggctgggtgtcagttagctaggggttgagtggtgggaagtaatgttggatgatagtcagctaggggttgagtggtgggaggtgaggttggatcatagccagctagggggtgaagggtaggaggtaaggttggatcatagccagctacggggtgaatggtaggaggtaaggttggatgacagtcagctagggggtgagtggtgggaggtgaggctgggtgtcagttagctagggggtgggtggtgggaggtaatgttggatgatattcagctagggggtgagtggtaggaggtgaggttggatcatagccagctagggggtgaatggtaggaggtaaggttggatgatcgtcagctgggggttgagtggtgggaggtgaggctgggtgtcagctagggggtgagtggtgggaggtgagcctggaaaggtagcagaagtgatccaggatcctaaggtgtgagaaagtgcttagattttattgattttcttttaggcataagagaaggccatggaggattttgagtagggttgggctgtaagcgtgtttgcatttatttacaaaaagattactctccttgctgtctggagaatcaaccataggattgcaagagagatcacgtaggagattctcataacaatctttgtaagtgatgaaggcagcttggattgtaggatcaccctgaaaatggtgagaagtggcagggcttgggttttattttgaaggcgtaatacacaggacttgataatggattagatctgcagaatgagggaaagaggtgaacctacattttgccctgagcaatggggtgaattgtgctatttatgaaaaagtggaagactcagagagagaggtaggtttggggctgaaaatgagccccatttgggctttttatgggctcttcctgatctccttctctccccttgcttttgaggtattaccagctacaggggctgaagaaggagcaatcaggccagggtttaaaggggcactgggactgagccagggaggtagctagcatgagtggtaagttgtttacatgcaggggattgaacaaataagtaaatatattgagggtaaagggaactaggtttatcatcaacagataagggatttataaatgtggaaaggggaaagattaaaaagaaccttgaggtgttagactagaattggaagtattaatgtaaacacatggttttggaaacatgtatatataggtgataatatagagacacactcatatacacacccagaaggcctaggagcagtcaatcacttatcagcagtgagtttgccaactgcctagattctggtttgtaaattccatcctctactaaaagggaagggaaccaaggctccttgaaggaatagttaattccaggataagtacaaaatgaccttggaaaactatctgtgctagaaagtaaggaaacactcagaatgatgggagcctttcaagttacaggtcccagcttgaagggactctcactggccaaattttggacaatttgagcaagagagtaaatgatggcgatggatatacattaaataaatgggagagaagcaaagtttgttgttgttgttgttgttgttgtttacggtagaatggctgaggaaggaaggagtaatggagtgaaaaaaatcaccatttggcaaccactgtggtggtggttggttcaagtggtagttattaatagacactaacgttggtgtgaggatgtttgatgagaaacagaatattgatgtagtcttgagatatctcccccaaaacatgtattaattacagagggagagctggtgaccaggtggtcgaggggtgggctatgctcacatcacgtgcctcccaaggagaaatactgagatgggcaccgcatccttgctgacaaaattgtattcctgacgacatcccagcctgagtctgggtacgagaaaacactgacagactctggttaggggacgtggcagagagggacaggcctgaactcttactattatgtgataagtacctttgtggatacaagtctgtatttaagagtattccttagaatagagttctaagaatgtagtaactagatcaaagaacaagaaattttaaagactctcaaaaagtataatcaaattatgtccctaaacctagcaccaatttatatccacactagtcatacataaaaaggacccattatattagctcaaaatagcagtgagtttatttgcacacattttaaaataaagatacaataaaccatagagccttagaaacgacccatttcaacttgcctgagagtaggaattagatatttctgatgcaagaatatcatctgtggtatccttcacagatgttcctcccaccccccgcataaacattttcaatgaaagtttatggattttatgtgtttcatggtggctaaatgattattaaaattttagggcttcccaaattactaaaggaaaatttgtcttttgtaatgttattaacctgtgcaataacctacagaaaacatctactgataatgggttctcaaaatgtaaggagttgatagaacttaaaaattcactcatgctttgtaaaagaaaaatatattgatagaatgaacaacagaaggagtaaatagcatttctgttgtttatttgtgataacattaaaaatactttcacatagataggcatgtgaaatatattatgtattaatatttcagaattattgtgaatatgaagttagcttatgtacataaataaggaaaatgtaggccaaggtagctaaatgcaaacacagaatatcagcattcatttacctcaggagaagttactagtgagtctttgaatttcatctgtgaaacaatttgtgtgataacatattttctgaaagaattaatcacttatttccctatgcataaaaacattgtccacaagtatccataggtcaagtctaaatatcattaaaatttgatttgcagtgagaagtctttatcgtatagttgataacgtctgttgaattttcattgatttggaaatgatgtggcttgtgtttggaattaagctattagaatattctgtcactataactctgcttcatataccagtgaagaaatcatcattcatttaagagtctaacaagatttgactaatatgaactctgctttgaattttggacatgttcctgattgtcacaccagaataccaccctcaaactacatagggtttgcagttgatcttcagtgtggaacttttgataagttcacgtttttacttgatcacatcgagcatatttggggttgatctttatctgtacgctatgctaatgcttaacataagtcctttatttacccttggttttgtattgaaatgttcacgcttatttcgacttaggttatttagtagtaagaaatatgacagacattatcttcatttgaaaaataagcatttgaaaatttaaattttttattttcttaaattttgcatattgaatttagctaccatgtcctttggactttttcactgagaccccagttttcccagccatattccgagtccagcccagtagagaatgtagtttggttagaacatagtgtgtaagtaattaaatttgtgccactacctaagtatgtctcagatagtcaaaaataagtgatacaatgtattcattatttgctatcagccatactattttctcccacattagtgtaggttattgattccattatctatttttgtcgcctcacctaggtaatgacaataaagtgatacatgggagagtttattcttagaaaaggaatgattttgggttactatttatgatgcttatctgaacaatgtaaagtgttacagagtcatattttaaatatacaaagagttcataaggaatactttgcggttcaggtaaaaataagctgtctagaaattaagtaggcttttgttttaaacttgattcatttatttgtactaaagtagcaggttcagtaacacaccatttatctggtcattttccagaataagatggaattttccaggtaactgatcataaattagttttccaggtaactgaatcttaaacttcaaggactgaaatcctataaatttaactattgttgatggaaatttttgtagaacatactttctaccttcttacttttctgtatcttttcaatcagaggatactcaataaaatttgatctgttttctggctcaggactactgttttttccacctccagtacctcttctttctcccttaatgagtttgctttttattcccagtggcttgtgaacccaaagttgttaggaattgttgtttctggtaagccaggatccagggaggctcagagtgagggtgtagggaagaaagagtattctttaatgttggtcttttttattagttgttatcaggcattcacatcttcccactttggttctggctttggcgctttgctctggaaggctgcttaatgggaggtcactgactcctggtacgttaggtctcacctggtagctttgcctcctcttcatggtggagtaaattgagccctgagagtatcatgggaatcactcaagctcacacacactaagtagtgatggaaccctgggtttaagacccaagtcttctgtctgcaagtctagtgttttcctactataactgtcatgttaactccaggtcattattaggaacatagttagtagtcttgataaataaagaaggctctgttatttcttagtgggattcttgcctctcactttcttacctatgttggaaactagagtcatcctagactcctctgcactctgcattcgaagggtgactaaagccttgtctagtttacagcctatgcagcctctagcatcttacctcctctgcgttcttgtcacatggccctctttcaggctcttttcgtctttagccctctttccctccttgttctcctccctgcctctggactcattgtcaaacacaccatgcatcggcactcagaaaaaagtagcaaaaacatggtagtggagaggagagactgtacaaacatgaacagctgaagggcagagaataagtaccaatgagtagaaaaatcaaaacagtccaattattctatcaaattatacatgtattagatcagaaagaaaatgattccagcactgtagccaacctaaaccatgtgattcaggtggagtttggtacagtgcaaaccttgagtgcatgtggtgtgtaacagagacatctctcttaccactctctgaagattaatgtcactcctgataagactctgattagaatcctatttccaacatgtggtgatgctaagtaaacagtactgacaaggctgaaggatgtgagctctactaagtgaattgaaaagttggataaaaagactcgctgataaagatgagaggacactgattactcatgaaaaggaaagaccaagggaggacttccatttgacttcaaaataacatgaattttattattctgatagtgccaccaaaataaatcctatgtattctccaggcagtaagggcttatgttataggcattgttttaaatgtaaatatttttatcaaccgaatatatttaagatgtgaaatcagttatccctataagtctgtaatgaaaaatggcagtactgggtactctgtttatccttaaaatttagaaattcatgttctgagaagtttttttggtattatttctttgataactttcttctctttttgtcttttatctcttttaagaactcttgctagtttcctgttgaatttgctggattgatcttcctgttttcatctatttttctttcatccatctctttggctgcttcccccgccccccattccttgtttcacgataattttttcttagttatgtgaatatattcaatatatttccttttgctttctttgttgcctgtttcatcttccatttattaaaaaaactgttattttcttgtaaaaacccttaacatgagatctaccctcttagcagattttttaaggtgtacaatacagtattgtgaatataggcacaatgctgtatagcagatctctggaacttgctcatattgctttattggaactttttaccttttgattagcaaatccctgcatttggcctccctgcccgacattgttctgttctctgcttctatgagtttcactattttaggaagctcattgaagtgaaatcatgcagtatttgttctctttgaccaggttatttatctccctgagcataagtctcaaccatcttgtcacatattgcaggatttcgctcttttttttaagttaatattccattatatgtatatactacattttctttacccattcatctgtcaccaggcatttaggtgcttctgtgtcttggctattgtggataatgctgcagtgaacatgggagtacagatgtctctttgacttctcagttcctttgggtacatatctggaagtgagattgctggatcatatagtaattatatttttaattttttgagaaacctccataccattttccataacggttgtacagttttgcattcctagaaacaatatatagcattcaaatttctccacatcctccccagcacttgtctttttttttggtggtcccatcccaacaggtgtgaggtggtgttgcactgtggcttagctttgcatgttactgcttccttttttatttctctcggtctctgcctttcacactagaggctttcctcggttgtttgtgatacaggtgttaagaaattacttaggtagatagtgagggtatggaagtcctcagtaaggttttccatttaatgaaaagcagccccaaatcattttcctttctaacagaaaaatctgtgaaatcaagctggaaatagatgccggcagttgtgccaatcatgttcaaaatggtggccccatcttcccttctctttatcagccacgtgtacatgtacagtaaggagcagacaagacagcgccagtcagtggacagctcatttgcataataagattagggtggggtggccagccttccccgtgggctgtgtaaatgtcatgcagtggctcactcctgtaatcccagcactttgggaggccaaggtgggcggatcacctgaggtcaggagttcgagaccagcctggccaacatggtgaaaccccgtctctacttaaaaatacaaaaaattagctgggcatggtgatacgcacctgtaatcccagctactcaggagactgaggcaggagaattgcttgaacccaggaggcggaggttggagtgagccaagatcacatcattgcactccaagagtgagactttgtctccaaaaaaataataaataaagaaaaagaaaactgttaggctataaagagtccctttgtttatctgttagcttaatttaaaagtaaaacatatactattctaattacatgcattaatgttgaatgttaccttcaaaagtttatagctcttatccctaatgccaacaacatctgattactttgcaccatatggctgcagtgtggtgtatggaaagaaagctggctggggacccagccaggctcagtcatactattctttagtagtgtgaccttatgcaggcttcttaacttctttgcttgaaagttttctcagctgtaaagcgcgggccttctataacatggtcccttagcatccttatatttgtaatattccctcattgtatgagaaactatgtctatattggtcgttctttttcagttagtaatcagatgttttctgtgtatgtatatgcgtgtctacatacacagcgtggttgaaaatacataaatacatgtagttaaaacaccacccccactcaaaatagatttaggctatatttgctaatggatcctcataagttcttgcagatattctcatccatgtgtcaatatttgcacataaatcattatccaggcactatatcattttttctcacatcttagaaatgcttttatgtaaacatattcctgaacatatttattactagtcaatatctagtactataatttataaattaataagaaatttaagtttttatttttttatctttttttaaaatctaattccccccctgcatgtttgacttgtgctggcagaataatttttttttttcttagacggagtctcactctgtcgcccaggctggagtgcagtggtgcgatctcggctcactgcaagctccgcctcctgggtccacaccattctccagcctgagcctcccaagtagctgtgactacaggcgcccgccaccacacccagctaattttttttttgtgtgtgtgtttttactagagacggggttgcaccatgttagccaggatggtctcgatctcctgaccttgtgatctgcctgcctcagcctcccaaagtgttgggattataggtgtgaactgctgcacccggccactagcagaataattttttaaaaaatctatgcatggggctcgttggctcatgcctgtaatcttagcacttgtggaggccaaggtgggcagatcacttgaggccaggagttgagaccagcctggccaacttggcgaaaccctgtttctacttaaaacaaaacaaaaaaaccccacaaaaattagccaggcatggtggctcacccctgtgatcccagctacttgggaggctgaggcacaagaattgctcgaacgtgggagatggaggttgcagtaagctgagattgtgccactccactccagcctgggcaacagagtgggactctgtctcaaaaaaaaaaacaaaaacaaaaaacaaacctatgcattgaaaagtgtctgaaagtaaataaagcaaatgttaacaatacttgtattcgttggaatttgaagtgatttttctgtgtatttaatatttttaacaattgatattttattgggaaaaatccattttaataaaagtaccatgctattatgaagtaattatgaatcagtagttgtttagttgaattataaaaccatattctttattgactattaaatcacacatcattaaaaatatttttttcttcaatctctctatttttttaattgaagtataatttacacatattaaaatgcacagattttaactataccctctgagtcttttacccactgtacttaaaatataaaacattccagtaatctcataaaattcccttaaatccctgttatccctcttaaatcagtccattccctcttcgcagacagctaccgatctgatacctatcatcatggattagtgttttctgtttggaacattgaataaatggaactatgcactcttgtgtctgactatcccattatccatttgatcactgcttacagatcttatgactgtcttaaaatacccattgttcttcttttcttaatgtctatgtaactggccctaagtcacacagctgggaagtgctagagccagggcctggcctcaggtccatgtgcccctgagctctttcccctaatcctgtgtgtgccgctttccaaggcccccgactggaaatccgcttgctggggagggttaggttggactgtaaatcactttgtcactctaaggaatttgttccttattcctcatatatggattctccattgtggcaccatgactctttggggttgaaaagaataacaaactgcaagcttgtttaaaaaataatccagtttttcttcagtgactattcatcaggcagcagctgtgagtcagatactgttctaagcaggctgctgactgcgccctggatgtgggatgatctgtctgtgctgtggagtccaggaacttgactcttgatgtgtcggcattttgaggtgtttccccttgagctggtcaggttccctggagaagactgtattcctcttctgcctagaaggtgatagcctggctgccagtgttcaggaagcagagttggggcctccgtgcacaaatccaggtaatctccctgttttcagtgaggcatcctggtggcagataccccagagtctccctctgcaaagagtgaacctccagtgctcctccagggtggagagggcagtcacctagtttgcatgtggggaaagggatccaggcactgatggtttttttcctgcctttcgtggagtctttcttattttggctctcctgggtgggaagacatgacagaccacgtggccttagtccccacattataaggaataaaatccagatttcttagcatgacatccaggatgtcatgggtgggtaggtggatggggtggggcagattttgtgttggcaattacattggccatttgtttgtcccattgccaactgcggctttgggcctcttgggtcagctttcacacctcccactgctgtgatgttttccagctgtccgcattttgtcttttcttgtgtttccacctttaaaagaaaatcctgtgctttttttttgtttttaaatcttggaaggcctttttgaaaaaatcagttcaggtataaatttcttttcattaattttgccttttaatgtatcctcttcactctgaggcaagttcagaaatctgaatttccttatttaccgtgaatcaatgtcatttcgactccaacacttgcctgtttccctgtcagcaaattatccttatttatgcttaaggtaaatctccccacttacctaggcaggccaatgctgtccatatcttggattccatgttaaggaatttgtattttattccttctaatgggagaactgaccaagtccacatggtttcctcgtgtctgcccacccggctacttctgtgccaggcttagggcacaggagtttatactctctatgcaaaccccagaacttcatgaacctggagtgggggcagaaaggcccattcaggcccagatcaagaggaagtcactctggtggctggatgacattttaagtaatagaagagggccaaagaaagtgttccaaaagcacacttatgctgtcggcatgattttatggttgtccacacaaagaggcagacggaatcttcttgaaagttttttgctggattccttttcttgttcctgtcccatcccccaaactggcatgtctcttcaatgcagtcactaactagtgtggctcagttcataggaaagagtgtctggttgttgtttgttgaatactttctgcgatcattatgcagacaagaagaccaaaagcagacagattatattagctctgtcttctttcctcatgccacctgtttgccaggttggtcatattttctatccccaagttaggggctgtggggagatggaggccaggggatctcacttggacctatcaaggagttggagcatggctataaatactttttccagttgctgcttagtttttagcaattccttcaaaactagatagagagagttggtgcttagtttttagcagttccttcacaactagatagataggtaggtagatagacagagcttaaaacaattattagcaagtttccatgggattttaatgggaaaaggagagaggaaatgttgggcctttgcctttattacctggagtacgcagaagagggtttcttgaggaagttttaggctagaacagctgagtttctgcccgccttgaaagtccactatcagagagatccctgctgcctggagctcagtggagatggatggacttgcctggctcattaagagcagggccgtatcacatctgtctttcaaaaccttgcatctgacataattcgtgatgtgtaataggtgctcaataaagggttgtagattgaatgactaaatgaggcagcgatcaccatggcagtcatccacatcagggtgagtagtggaaatgaatgaggttaggaagaattattgcattaatttttagggctcaccaactcagtgcttacaggatccaaatgaaagaataaacactgcccattctaggatgataaatgacagccgaaatttggcctcagtataggggcagagagtggcagcctggagggcacatgcctcatctgatgggagctgttgccagctgcagccagtaggcataatgacatacctcctaattttttttagatttaagtaaaactctggatggtagtgtgaaatatctttacttttcatttcaaatttatgatattttgagtcacaaaaaaaacacatatgtggatcacatttgattgaaggccttctcattgtcctctctggtaaacccaaaagaagagggaggccgggtgtggtggctgacgccggtaatcctagcactttggaagaccaaggcaggtggatcagctgaggtcaggagttcaagaccagcctggccaacatgacgaaaccccatcactactaaaaatacaaaaattagccagacatggttgcagtcgcctgtaatctcagctattcgggaggccgagacaggagaatcgcttgaacctgggaggcagaggttgcagtgggccgaaattgccccactttactgcagtctgggtgaaagagtgatacttcatctcaaaaacaaaaaaagaagaggcctgggttgctgggaaccttcatttaaggggcaagtggaagaaaaataatccttcaacaagactgaaaaggcgcagttaaagaaccagagagagaagtgactctgaatctaagaagaagactttaaggaaggctggtcaaggttgatggacatctgctatgatatgtgctatggggaagtcagagaacacagtgaattgcttatgaatgcagggagaatgcacattcacatgcagctattttgggtctgacacaagcatggtgcagtctgtgacactggtatcacttggaccaaacttgcttttaaagttgtttccataaggctctggcaagaaaagagtccaagatcatataaatttttatgttgaaagccatcattcgtatatctataataaaggactttaaaggagtatttaaaatatttcaaggaatttacatgaaactgtcaaggaatcactatttttatatcttcaccatgatagggtggaccttcgtcttgtcttttgggggaagttatgacagtagatcctattccaggaagttttattttactggaggaaagcccagttaaaatcccagtgttaatttcctgtcatgttaactaccaaagaacagatttccaaagtgtctcaaacatttgacacaatcatttccgttttctaaacttgatctgtgtttcttgggtgatacatgcattctgattcgaaattgaacaaagtatattcttaagtataactatatcctgtctaaggcagtggactcatggagtatgttttcatttttatgttaattgtcgagagtttataagtcattgtaaattagtctgagtgctttgtgtgagttagaaattgtctagtagagcaaaacccttttactaaactcctcctgtgtgcttccacttgctcagagccatgcaggcaacttcttacatgcagaggagggcgtaatctaagccatacgctggtcattgggtggacttccatgcctctatgcctttctcatgtgtgtttgcctctgcctgtaattttccatccattcccaacctcttttccttctcttccttcttatgaagtcctagttatgcttcagggatgatttaatatgtcagtccttctgtagagatccctaagaccttcttaccactgtacccatgaaactttatatataactatggatatggcacttatcaaataatatatttggtatttatttttctcttccacatgactgtgtatatcctaaagtccatgtcactaatttctgcatctaggcatgtatctgacataggggagcttttcagtaactgatggttgaattaggtggaattcctccaataagacatcaccccaatgcatgacttaggcaaataaggtattaaccctgtgtggtgttgaagaaccattaagcttaagagtattaaggagctaaatgccctcttatgttttgttatgtaatttaaacagaggaacaaaaaataaaattctttaagagaagaaggactagatatgtccgtaagccttgataaactaattataaaacttgtgggtgcagcacatcaacatggcacatgtatacatatgtaacaaacctgcacattgtgcacatgtaccctcaaaattaaagtataatgatagaaacttgacacaattatattttaacgtatttcacattgatttaaaatttaattgtcgataagtcatcagcggcaaacccaaactgtagaattttaattcccaatgatagatttttctaatctgtagtagatttcttattatgttatggcctgatacacatagcttagatgtgccttgagtaaaatcatgaccctgaaatctagcgactgtagatgttttacatattagaacttagggcataatttttctccccaacagcagggctggaaaggtgattacatttcagaagggtcctttcagcctgtgccttgtagcgatttggggcatgaccctttgctttacacctgcatagctggtgtggccttttctcccaggctcctgggctgggcctttcctctttcagagagaaggacccagggaagaggggctgaaatgggagacatcgttgtgtgccaagcataggatcatgcctggcctatggtaggttagcatttaataagtgtttatgcaatattgcttgattaaaatagcattgatcttttaatcaataacattattaaaataaaaatgttttaaaatgttaaaaatattttaatatctttacaataactattggctatgccttacagtactattgtctctctttaaacctctcttagaaactgtgtgttaggtttggttttattctttgattactagaagtgcttttaaagaaggtacagagctctaaaaagggcttctttcaagtgtagagagagaaattagaaaaaacatcaaagacaaagacttctaagaaggaaaataaaaattgatttaccttcgctttagaagcttcccaaaaggggagactaggaaaaatagcagaccagaccatactgaaggcttcctttattccctctgttgtctcattccctggtgccaagagcctctttggggagattacactttatggcaaggttgcatttgttgttattttgttctcatctccatctgggacaagcttaggcataattcctatttgtatttcaaattttcctgccaaaaacgtgttgacctatgtctccaaagtaacggaggttatgcatcatttctactctagttgtggaaatcgacaaaataatgtttctaccactagcaagaaaaattgagatgttactgtagagaacttgccattgaaatggcattagtgataggatttgacgttttgaaaaaatagatcccattcttcttggcttcctgttatactccttgcttaatttctgtttcatggacgcgatcactatctgttgcaagtgtgaggatgaagccacagatggctagactctgaccccataggggagccattcttactaaagagatggctcttaagaccaaatggagcactggtagaatgggtgccaggtgagtgggagagactgccttcctcatggtctgctcgtggctggtaatatccttgcaggggccacctctactcgtagggaataaggatgacacatagccacataaaggcaggtctggaaactcgcaagatgtccacctgcttacttctgagaaaaaaagtttggaatggtgcactctgtatgtttctcagcaggcagagcgctgggtttgttgagtgagattgtgttacacgtactcatagacacaggcaggagttacctggacttcatgtttacagtgtgttttaaattctattgatgttcgtatgttgtgaattccattttgggtgtattctgtacgaaaggatgatcttttcagagtatgtaatgaatattaacttcttagtgacttcagaagacccatttattggttacttgatagtacaaacaccaacagccatctgagttctgtaaattgttactgagatgagcttttttatttttgaaaaacgatcatttctctatgcatagattattatcactggccatctctactactgctcaactgaattccttcctcaaccataaccattgtgtagtttttatatttgattattttcctcatatatcgttatccttgactaaaggcctttctccttaggaaatgctttagactacctggccttatagcatcaatttcatttttaaatgcctgtggagacatgcttgactgcatatgaattttctagtagagttctgtaagaattcttcacctcccaaagaccatatgtatccatcttggttcccaacagtttataactgccagaataatttaaaagacattttccctttgcaagttaatttagaatagaacatattttgtcagagaaagtggtgtgggaaacagcttggatcaagcagccacagacctctagcgacctcacaggcagcatggggcctgtagagggcactgcaccaggagtctgatgatgtggcctgggtcccggccatgcccaaatgaggggcgaagtctttcccagtcacttctgctctcttggcttaagtttcttcacatggaaaatgagtcgttggcctaatgatgccccaaagtagcgtttagattttaaaatgtcattgattctagattttaacatctacaagttcaacatgaacgtcgacagctcatttagtcttcataatcctctttgtaccaaagcagattttgtgatcgcattctgaaaacatcaggaaaactaggatatgctacagcacttaccaaccataaaatcaggaaatctaggttatgctacagcacttaccaaccaagaaatctcagtggcttaaagcaagtttatttcctgcttagggtgcacagttagtgtgggttgagtgaggtgtcactgctcgtcacagttacccagggactcaggctgatggagcagctgccatctcagatgctgctgatagctgtcagagggaagcagtatggtggatttgtataaaactcacggactcctgagccttgtactgtaactgagtccctaacttctgcctgcctttcttttctgcagcaggtgaccatcactgatggagggggcaggagagtgtgctcctaccaggactgggaggagagctggtgctatgtggtgggcggcagtattggcaccacatgttacagagggctgcttctgaccaaagccaactttaggagagagttttaattgacgcctaacagacctttgctgggctcatttccatactgtgcccaatgagaaagaactatgaggaatggggaaaaggcctcaggtagaaagtagagaagagtcatgggattgatgcaggggtcagaaaaatggtggggcacaccaaataaacattttggcaggcggtcaaaaggcctagagttaatggctaaagtgaggccaagatgatattgaaaatgttcatctttcatgttgaaagactaatgtgcagtcacttctagcatgatggggatcgtggttttcctcatagctgtcccctgtagaagtctcagttactcctcatccttcaagacttaatgcaaatatttatctgcgtgtattttcttttcctactgaaatgtgaatgtttccaggacaaggagccatttcatcctagcacctagtttacaggcactaagtgaatattacatgattgaaatgaaaccacctggcaaccctctgctatggtgcccatgtgcctgccatcctctggctggttcagcattttaccaggccagagctgggcacagaattggttctgtagaagcagctaaagcaagatgacatttctgagacttctggccgctgttctgttaattttggtgctgtcaagcgaaagggtaatcaaatagtactttgaaatctgaaaagtgaaaagagaaaagtaaactcatacctaaaatataatttctgttctgtatattctagtttccttcttttgagttgctgtccatttagtgtagtgcaatcaagaatacctaaatcagtataacctcgtcattgaaagaaagactttagtaacctattgatatttctgtcttcattattttattattatgaaattgctgaaaataattacacaagtgatataacttttaatcgttgggatgcaaaacagtggttctcaagcttcagagtgcctcagggttgcctggagggcttgctggggccccactcccagagtgtgcatttcaggtggtctggggtggggcctgggagtcagcatttctgtggagttccctgaggatgatgacaccgcgggtctgggaaccacactgtaacgaacaatgatgtacaggaaagggcactggaaacagaaaagcatgggtgtgaatcctccatgctccctaataaccatatgacagtaggtctctcggcccctctaatcctctgtttccaccttgtggaacgtgaaggccctagttgacctaacagatgatcagatgaggttgtacactaaagccgtttttaaaaaaataaggctctctgaaggtatcttcttacaatatcctacagattgagaatcatggacacttgttttacattcagagtatacacagctctgtaccaggtagtggaaaacaggacatggaaagaaaaagagaacaggagaaatgtggcacatgccaagcaccaaaatgagtgatgtgactgtttaaaattaagagaaagacacgctgtggtgggctgcccaggggggacgtctcccaaactgtactgcgtaaagaccatcatttcacaaggaacctgtggtcactttgtgttccaggatggcttattgcacgggtagcgtcctggaatctagaaatctctcatattagtgcatttgggtagtttatcttttcttggactcaatctcaggttacctacccgttagagtttatgaagttaagagtttaaagttcctcattttgcaagcatttaaaagtcatcatctcaacaaggaggtgctactgtaaatataagtatcagaaagatctatgaagtcatcttttcacacttttgatttaactaattgagggaggggaggaaaatctgaaaatctcaaggaatttttaatcttaagattaaaaaatgtagctcatacatagttgaccagcactagcatttttcttttaaggtgtgtgaccttgtctacacttagagttttagataatttttattatgatttaaccctaatgttttaaaattacaattaatagtaggtttagaaattaatgttgtaagtaatatattaacatttttactctactttaagtgctttgatagccacatatttaaggttggataaaaactgtaatttaacagtcataattattataattgatctgaataaaaatatgaactaactgtattggtcaaagcaagttatgtggtaaataaaaattaacaataaaattgaggttttaaaacttaccttgggcaaagactgtatctgggtgatagattgagctctagacagtgaagtgtacctatggatactaactgccgttatgattaataaacacgttgttatacttcaattgtaatagcattttattatgtattatttttcaccaaagaatactaacaggccagttaccactgtgcaggttctgtttaaactcttggcattaaaaaaggaatcctcattcatacttgaaaaagattggaaatccctgacctagtccatgcttgtccatgatactaccctggcccttcatcttgactgactctgtagatcactgttaatgttggtttatgtatttcttacccttttggatagataccttttctaaaggaagcaatgatggaaaactggctgttagctaggttgagatgtgtgcacacttcattacactcttaacaggcagatacccgtcagccttaaaggatgactttttgccaccctgctttcctttctgcctggccatctgcttcttagaatcttccctgaccatgctgtatgttccagtaccttctttgttgaagaacgtattggaaagcatagtcagtgtcttttaacctgattcttccttctgttcttttgaagacagctttgattgtttctaaagtgccaatggaaaaataaatccaagaatttgtctccccagtttttgaaaaattgtagtgtagggcaactgtaaaacacatactatgtactataagtttcccacaattaaatcagtatgaatagttgttgaaatgcatcagttgaatagattagagattcaagtatatatgaagatctgaaatgtaatagacctggcaaaactcagttcatggaaggtggttgattcaataaatatcattgatataactgattatacatctggaaaaaataattgtaggaacccttcccacactgtatacaaaaattaattctagatgaattattgttctaaatgttctaaaaatacacaagtaatagaggtaggtcttaaacctgggtctgtcttactccaaaactactgagctacattttaaatgttaatagataatgcgagattacgagtcccaaagatgagaggagagaaacattttcttttgctaacatttgactttttattttttgtcgtaaacaatgctgagatgaacatcctaatgtctacattggtaagtggatacatgattattttctttttaacacattcctggaaatgaaatagctgtgtttgagggcacccaggcttttgaaataaacttccagattgctctccagaaaggctgtgctaaattagtgactttattcttttgtcatgtttaatatcccactatttttctcttcagaccatcttttgttatggagaaggattgtactcccatcttccttttatattggcaagtttctaattaacctagggcttcctgtgaaatagggagaagctgatattttgtatccttttatcatctatattaataagctcataaagaaagtatcactttgacctcagatatctccttctctagcattaatcggagacttctgttaagatccagccatatagaacaacaacagtagggttttactctccctactatcaatatattggctgtgctggaggtgaggcgccccccttcctcctgcagccagagagctgcatccctgggaagaacctgctcttacatgactttaactacttgccattcaatgtaagtgcagcatatttccaaactgcgtaaaaaatgagctgtgtgaaggcttcctcctgtctttgttatctttcatgcaaacagttctttttgatagaatttggaatttaccgaattcattccgaaggctgtgaaatgtgatctctatgagttatagtcttcctgtgaggatgcgttgtttttgtggaaggcaccaccgggttgacacagtattatttatttttctcccacatacttcttgtaccttcctctgtaaccaatatgagactgtattgaagagaaataatcttgccaagtatttgatatacatagaattctttgtgagttgctatcttaacttaaaaattttaatatgctaaatatccatgtgccaaaggaaaataaaagtaagttcttttcagagcagggacttttatgtcttacagtattcagtgtgaagtaggatagaggtatatcatcgatcacagtgcacaccagacagaatttagagtgtttacatctgcgatcagagttacctggtctcagggcagagcatgttttgttttttttccctactttttagcaaagacttaggctattgtaaataagctgaaaattatcacagaaattgttgaagttggctctgaacaagaatgcttgatctttctataaacagctttattaatgcacgtcaaggcactgttctctaccatttccttctgcttgttgcagaccagctaatgtgttaacagagatctgaatcatgacctttttttcccataggcataggccgactctttccttgagctaaaatttagccagaaaggaaaaaaaaacccattttggtgcatgtggcatgaaaatgaaacaatgcagctttatttagggtctcctttaacctacatcttaaaaatatattttaagtctgtaatatgcctattaaacattagcacagttatcaaaataatgatatttgtaaaatcaatgtgaatatgtgaaatttgtagctttatatacaaatcatatacatgggcatgcatgcatacatatttcaacatattaatatgtgtctatctcaatatatgcatatctcaaatttacatatgtatatcttatacatatataattgagatagcaccaattataaaggatttcttaaagaggctgcaaatttaggcatttgtcattaaataatcccataatatttcagtgcctgaaatcattctagcctttatattgtagtcatttgcgttttcttcccttttctaaatgtagtctccagatgaattaatatactcacaatcaacatactgtggcacgagtaagaactatgtgtattagacaagttcaaagcagtcctgacgctcacttgactaaggcatgtgcctcatgtcccctttaccttcagctcttctgggccactgctgggtgctcattgctgctcctgtgctgactgtctgcagtgtgtgccgtggaatacttctttgcctatttatcatatctttggttcctctccatccttaatgctgaacttttagagcatgtagaacaaatcagaagtctcttgtgctgattatatccatttgacagatgtgttcagaaattttcttgcactcattaaaatataaagtaaaaattgaaatgctttatatgatattaatatggatattactatgacaagtgatagcttacaatgaaaagatttcttttaagaactcttgccatatttccttctattttcatgttttgatatttctagaaaatgtttttactgtattcaagattagggttttgtaatttttagcaatactgctgtggagcctagttgaaattagtgtattactttagttcagactttcttcttatcattcttgattgttaaaagaaataaaggtttacacagaatgtatagcagtgttgagtgaactcaaccagcttttaatatattttttagaaggttaggagaaagattaacctatttaaggacctaacctacttttacatcctgcaaactattttttttaaattttaaaacatttttcgtttttgttcttttgtattttgtttattgtaaccgtagtttgtcaggagttacaacccggccaacaccgggggtggggggcccaacatcacacatctgtgtttgtaatgtagtatttattaatacaggtcatataacattaatgtgtcagcacctcatggatatgtgaattatttaaaatgagcatctgggtactattttttgatatttgaaataaactgaatttttaatgttcatatgttatacgatatgccaagattatcctggtaaagttttcatatccaactggggaatcagcagcaatgtttctccctcatttcttgggtcaagcaagcctaaagttggacacaacctttaaaatgagctgattatggacacatttatacatcattttgttaataagttgtgcatcagttaaactgaaagcttgctttgcttgcctcattggtttttttttttttaatttttctggaattaaaaccactgaaaaataagtccagaaacatcaatttggctgaccttagtttccccctaaatttagtagttttatacagcagaaaacttgtaaagttacttatttacagacaggctctcagtgtgtcacccaggctggagtacagcagcacgatcacggctcaccgcagcctgagactcgtgggttcgagcagtgtttccaccctggcctcccgaagagttgagattacaggcatgagccactgcacctggcctaaatttttttttgttgttgtttttaaggaacaattttctttacagaattatttagaattagaaattgtgaatcacattatcaagcttttaaaaactcttaatttaattgagaaaattaagtattaatactatggcctgggtcgttcgggttgtagtgtgatacaactcctaaacatgaaagattttactcttcttcttcttcttcttttttttttgagccggagcctcgctctgtcgcccaggctggagtgcggtggcgcaatcttggctcactgcaagctccacctcccgggttcatgccattctctgcctcagcctcctgagtagctgggactacaggcgcccaccaccaagcctggctaattttttgtatttttagtagagacggggtttcactgtattagcaaggatggtctcgatcgatctcctgaccttgtgatccacccgccttggcctcccaaagtgtggggattacaggtgtgagccaccgcgcccagctgattttactcttttgaaccctgtggttcctggaagttgaagtcctgtcccccagtagatgcttgttgaatgaatgctcactcagccactctttttgccagaggctactagtttctcacctacctcttctccctctcatctaggctgacatactctgaaagcaaggcagaatttgctcatatattcatttatgatccatattttttccttggaaataattattttcattttgctggaccacgttttagagagcctcacttctgttgatttgattctgagcaatgtttctgagctggactgaccacagagtaagatcttaccttattcatggctgtgaatcatattgagccatttgtcttagctgtcatgcaatttgctaattaggtcattctaggggttgagggaaatgaaagactttgaaataatcattaccttctcagaacaaagcagcagcagttaaatgcttttgcccagtcattttactctgatgttcaataaattcagaagtggaaggtaagttgggatcttactgttgcataattatgctttccagtttatctgaagattgtgcagaagatatttaaatcagtgtcttacacagttataagttgtatatttctgtttttcttattacattttttatcataaaactaaaacctattagttgaagaacatttggaaaatacagagaaatagtaaataaaaaatttaaaagtactcctcatcctaccatctagtataattatttgatggatttctttctggtctttcctattcatatatttttcataaaacttaattattgccttatattgtacaacaatagctgacattttctgagtgtctatttcatagcaggcagtgatctaagagctttaaatgcattatctacttaatgttcatagcaatctaggaggcagttattttccaatgatgaatctgaaacttaagattttgctctatgtcaaaaaatgagaaatttaagacttctagcttggacaaaatggcacagacctgtttctcccactttctcccaactaaatacaatgatagaccccagaaataatgcaagaaacagaaggagaactctaaaacttggtaggaagaagtcaagatggtttggggcccaggactaaaggactgacacaatggcagggcatctcacattccctcacccatcaggagaggcagacctggcctttcttgacctctgaactagcaaccgagatagtccagggaggctgcttcctttttttattcaaatggaagcaagcaagcagccaagggaaatactcttctttcttgctgagatacccttttccagtgtgtgatacctgggcttctgtgaagcaattgttagaaggatcccactgcaacaaatggtccagctgagtagcttctttgtcctcatgcacctaagaccaccttcttctgcccagagaggaataggtggttaggaaagcctaatccattctgtgggcctgaacaccaccactccttctactgagggacactgggcattaggcctggggaagtcccttcactccctcaggcagcatcagcagggacccgtgggagcccccatcagaaccagacaaatgaagcgggcacaaagaatgctgcaaaggctctgaaaattaagctggccctggaaccatagcccacaaaagtagaccaggacccacatactaagcctaaacagggtgactgcctagacaggaaatcagcaaggatgtagaaggtctgaacaacacaatcaagcaacaggactaaattgacgtttctggaatacttcacccagaaaccacagaatacatagtcttccaaagaattcgtgggacattcaccaagacggcgcacatcctgggccatagagcacttttaaacaaccaaactcatgcggagtgcactctctgatcgtagtggagtctattagaaatcagtaacagaaagacaacaggaaaaccttcaaacaggtaaaaatgaaacaacacactattaaataatacatgatttaaagatcaagttttaaaggaaataaaaatacataaaactgaaagcaaaaacagaacataccaaaatatttgggacgcaggtaaagcagttctgagagtgaaatttatggcactaaattactacattaaaaatgaggagagatagagaaagatagttcaatagaagcctccagagattgtactcactcctccataggatcaccaaattacccacagaaaaaatcatcttcataagaaccaagaatcaggtgagcaatcacagtacctggttttagcatcatactaaggaaagaggcactgaggagagtaggagagatagtcttcaatcacctaggccacctttccctcatccaaaaaatataactgataaacaaattcattatagttgctgaatacaaaattaacatccaaaaaggagtagtatttgtctatgccaaaaacaaacaatctgaaaaaagaaatcaagaaactaatcccatttacaatagctacaaaaaaatactaggaattaagttaaccagagaagtgaaaaatccctgtaaggaaaactataaaactttttgcaagaaattgaagaggacacgcaaaaaaatggaaagatattacatgtttgtagatttgaagaatcaatattgttcaaatgtccatattacccagggcaatctatagattcaatgcaatccctatcaaaatacccatgaattcttcacagaaatagaaaaacaatcctaaaatttaaatggaaccacaaaaagccaagaatagacaaatttatcctaaacaaaaagaacataacttgaggagtcacatttacatgacttgaagttatactacagagctatagtaaccaaaacaacatggtatgggcataaaaataggcaagttgaccagtggaacaaaattaaaatccagaaataaatctatacacctacagtgaactcacttttgacaaaggtgccaagaatatacattggggaaaggacactcttttcagtaaatgttgctgggaaaactggatatccatatacagaagaatgaaactagacctctatgtctcatcacatacaaaaatcaaaatggattaaaaactttaagatgtgaagattatgaaactagtaaaagaaaacattggggaaactctccagggcattggatggggtaaggatttcttgagtaatactctacaaatatgggcaaacaaagcaaaaatggacaaatgagatcacatgaagttaaaaagcttctgcacagcaaaggaaaacaatcaacaaagcaaagagacaattcagtgggagaaaatatttgcaaaccatccatctgacaagggattagtaaccagcatatataaggagttcaagcaactctataggaaaatatttaataatctgattaaaaaatggacaaaagatctgaatagatattttgcaaaagaagacatacaaatggcaaacaggtgtattaaacgtcattgatcatcagagaaatgcaaatcaaaaccattatacaacaaggtatcatctcactccagttaaaatggcttttatcttaaagacaggcagtaacaaatgctggcaagaatgtggagaaaagggaatcctcatacactatcggtgggaatgtaaattagggaaaccaccatggagagcagtttggaggtttctcaaaaaagtaaaaatagagctaccatatgatccagcaaagccactgttaggtatatatgccaaagaaaggaatcagtataccgaagaggtatctgtacttctatgttttttgcagcactattcacaatagccaacatttgtaagcaacctaagtgttcttcagcagatgaatggataaagaaaatgtgatacatatacacgatggagtatattcagccataaagaaaaatgagatcctgtcatttgcaacaacactcgttttgttaagtggagtaggtcaagcacagaaggacaaacttcatgtgttctcagtcatttatgggagctaagaaaagtaaaacaattgaactcatggagataaagggtagaatggttccctgaggctggaaaaggttggtgggggtgcagcaagtagggatggttaatgggtacaaaaatatagttagaatgaataagatctagtatttcatagtacaacagggtgactaaagtcaataatttattatacatttaataactagaggccaggtgtggtggctcacaccttgtaatcccagcactttgggaggctgaggcaggctgattatctcaggtcaggattttgagaccagtctggcgaacctggtgaaacctcgtctctactaaaaatacaaaaattaagccaggtgtggtggtgcacacctgtaatcccagctactctggagactgaggcaggaggcagtgagccaagatcacgccactgcactccagcctgggcagcagagtgagattctgtttcaaataaataaataaaaataaaataactagaagagtataattggattgtttgtaacacaaagaagggattagtacttacgtgatggatacccataccccgtttaccctgatgtgattattacacattgtatgtctgtatcacaatatctcatgtaccccttaaatatttacacatactgtagactcacaaaaattaaaaatattaaaaaataaggaaaggtctcaaatcaataatctaagttaatacctcaagaaattaggaaaagaagagcaaaataaatccagaacaagcagaaggaaagagataataaaagcaaaagtcgacaaaactgaaaatagggaaacagtagaaaaaaaatcaatgtatcaaaaacctggtcctttaaaaactttaataaaattgataaatctgtaacaaaatcgagaggaaaagaggacacaaatctgtaatatcaagaatgaaatgggacaacagtacagatcctaaagccactaaaggactcataaaggacaagattacactcacacattttccaactaagaagaaatgaggtcagtttgtcaaaaactgcaaactaatactcaaccaggatgaaatagataatctgaagagtcctgtaaccattagggaaatggagagagggtagtggctatggtcacaaaagagcaagaccaggggtcctgatggcaatagaaatgttcagtgtcttgatgtggtgatggacacaggaacccacacatgtgctaacattttatagaattaagtacacacctacaagtaaatatcaaactgaggaaatctgagtaagataattggattatatccatgtcaaagaaatcctggtcccagcattgtactaaggctttcaaaatgttgccattggggataactcagtaaagggtactcagaatctctttgtattacatcctataacttgcatgtgaatctgttattatctcagttaaattttcgattaaaaaaagctagcagcttgttactttaggagttgaaccctgactgtatgactccagagaccttgttctcattcacacgtctgcatctccatgttatgttgagacattgcattcctagtagttttacatgatcacatgtagatcataccatatgtaaatagaaaagtatgcttgtacattgtctttaacagcaattatcagtattagacaaagcatagttttgtttccctcccccaccccccgaccctgttcctgtctcatagtttgaagtttcccttaagtattcacagttatagtccccaaagactttagatgccacgtggcatgcgtaaagccagcatattctattgaaatggccggtatagttgccgaatcagatgtttttagcttacagaaatgacaatttcatatgacatttcttttcatatgttcaaagaaattacttgagcaaaatgggagatttctggagtaggccataggatcaaaggagttgctggaggggacaagagagctctagtatcctcagagtttggaacctaggacacattctttttatttccatctcatactttcttctccctggattttggcacatactgcctgcagtggaatcattggtggtttccagtatcttctttgaccagtcctgcagtctgaaggaaataacttctgtattccaggatttgtttgaaaagatcatagagaagattagaattagcctggcttggatcacagccctacacttttccagtcactgggcaagaggcagtgattggcctggtacaggccatgtggacagggagggagaggttattgctctgtgaagggagtaagagctgggagggggcagaggggcaatgcagacacagctgttagagcgaccgctgggatccagcagctgctgaagcctgtgtctgagattatcaagtcaagatatctaaatggcagttaaatcatgaacataaaaataattttcaaagtatgcttaattgttcagttttttaattcagcagaatttttctcctctgctaatgacaaggcagtctatattagagactgtcaaaattatttcttaagaagcatttaaacaaataatttttgtagactgctatatgcatttcattagacaaatgtatattctgctacaaattcacataatcatttttccctcactctactcaagactacttagattgtttgaaagaaggctttggctaatgggtattggaaggaatggctgattgttttaaaatatcctgttgcatacaggatgtatttttttgaagggttaagaatgaaaataggaagcaagcatgttccctctgactgaaattactttccttgaagccattagtgtgtaagtcagatgctgaacttacgatatatagatattatataatatgttacatatatacttgaaaataaaattccaaacagaataatgactgttgcatggatatataatggagtaatttactatgatgaagtctgacttgatagcacatcaacacagtaagcctcattttgaacagttctgctgtttcctttgtgaaatggtagttggaagtattgtccgcggttatgcagcatggtgtttatgaagacctttgtggactctgcttggatccatttccaggaaaaaaaatttctctgccagtgaacttttatgtttcttttgccagaaaatggagaaagatgaatgtttcaaatttttttttaagtgccaggatacttagaagcagcctggttcagtgccaagatgtagtaatcagcttcctcagatgtagtcattcattgacgctcttttctgattcaccaccagtgtcttgcaagagctttcactttatctgcctgcagccctgttttaacagtagtgttgacacaactcacctgtgtccatttgtgatttctaaatagtttttaaatcataaatatttgaacctcaaggtaacgctgtaaagtatgaatagagatgacattgtattttttcaaaaaaaaaaaaaaaacacaaaaatctaaacggaaacaagcacagatgaacttaatgtcagtgtaaattgtagattatagacttcacaaggctggtctttgttttgttcactgtatcccttgctcctagtatagtgcttgacaataaatgtttcaggatgattgatgttgaataaacttaaaaagtactcagcacctcacaactttgaagaacatggaaacacttgtattggcagaagacagaaatgtgtagccccaggagacaggagatagctcaaagcaacctgtcatgagcacatttctttgaagcctggtgttttatcttaataacccatacaaaattgaattcttctttgtattaggaatgtttgttttatcatagagattgttttaaatgttacttatcataaaatattatgcttccgcaaaatacactgtttatcttgaataccctagcgtatctttagaagtacgtacttctattgcttttgaaaaatacaaatgtccaattaattacattttattgatgtactgtctatatgctgatgatatccaaatgtatgtcttttatctttatttcatctctgtaattaccattttagttaatggcaagtgtgtttttccagttgattgagaaaaaaaattctaagtcatccttgatgtgtgttttgtttttttttaaacttatatccagtgtgttggatagtatcattgggtttgacttgagaatatatctggaatttggtcatttttaaccattcctactactgctaccaatctgccgccattgtctcttacctggattcctgcactgggtttttagctggcctgtgggttttcccttgcaccccacagcccagtctccacacagcgttggcacgatcctgtaaaaacatcagagcaggtggcacccttctcagcactctccagtggccacccatttaaacagagttcagacccacgtctccactgggcctggcagagccctctctgtatcctcctctcctactacccctccccagctctgctcttccagcctctctggcctctttcctgttcctccaacctgcccgagttgctgctgcttctggggtctgcatttgctcttcccgaaggtgtccagatggctgtttcctacacttcctttgagtcttttctcaaaacatttcaatgaggtcatccccattcattccacctacaatttcgcaccaacccccaaacataaggtcctttctcacattttttttcttttggcacttatcacatctaacatactatatgttttatgtggtgaggatattgaatttctttccttcccttcccccttccccacccctagtgcaatgctagattgcaagcttgatgagggtaggggagaaaggcacctgttacctaagagacctgccaggaaatctttgcttcatcctgatctgtctccacagttctattagaatccttcctttttactctccttgtttttcttcaagggcagggggttgatccctaacaccctcaaaagactgcctcttggctttaggatattaagccaactttttgacaaaaacacatctgagctgctttccttgggcgtcagggatggagcttttattgaagaaaagaaagacactgtctcctctctggtcacttgtttgttcctgggtttcataggtgtgtttctacgtgttagactccacaagcagtgaaactcggagatctctgagaacataagctttctcatgagcactgttttccctgtgggtaggccacccctaaggtggtggtggtggtgtttatttccctaaatggtagttacgggtcaggtgtgattcctggcacatggtaaatgctcagtaaataatttctgaatcaagactggttccctcaattttaatctgatgacttattttctccttatatggattatacttggccttcccattttaacattctgaagctgcaggagatattattaaaggccaggctacaaagagctcacgttcccttccagaatacactgtttctaacaagcaagctgaataaatttctctgaatctggatttaaacaaaattcattataagactggccttgcatttggaacatgttcttataaggaacctgtaagtcatgaatatttcactttcttttctaagttttcttttcaaatgcacatttgctttcattttcttgttaaaatggattgagaaagattaacacaaatgctggtgggaaaaaatatagaggaaataagcattcataaatattttaggcctccgtttttcaacaacccacagctgtgtgtacatagttgatctgggacagaatgccacgccttgtctctacaatgtgttgcctcagagccagtgttcacctggggaatagaacttggatgtttcggaaactgcatagcaccctagtgaaaaatgcttccaagtgcaagacagactcttatctccaaggattccagaccgtattctaccgtttccaaaaataacctgccatcatcagctttgatccctacctttaagataacattttattttctatttgttcaagtaaaacatgttcataaaaagtactttggccttttcttccatagattgtaagtgtaaaaatttgcctaggtttcggtctcagccaagatggtcaactgcatatactactgagttctgaataccatgttagctattgagaaagaataaaagctagagggatgcatgggtgctaaaaactaacaacaaaaatgctaggaaccccttgggagactgaagtgggctttagcttctgtatagtggctaagtagacgggtagctgcagcctgtggacgaggcagccataggtgtctggagagtctggaggaaactggtttttaaaactattttttctaagttatgataaagtatacataacataaacttaccatttttaagtgtactgtttggtggcactaagtgcaatcacgttaagttctgcttttgcctctcctattgccttccctgaattttatttccagcccaattgtcactcacacgtgaggatataagaagtatcttcagctatacaagaccttataaaagtttctatataaagagccacactgaaacatgctgggaggaaatacttaaatatgaagggaagcaaatacacgggcagctacaagagataggggaggtaagggggatcaagtcccctggcaaagttcattgatgtcttgaaaaagaaggctaggacataagaaaacagaaaatacatgcaagtaacccagagctaaacttctagatgttaccgttattgagtggaggagaaaccaaagacggtagggatgaagaaacatacagatggatctgctggggagacattgtgaaaatgaaaagcaagaggtgcagcttttaaaccagcagaagaaaattggatctagccaatcaaaaataggaaaggggaagtgggatggaaagaataaaacaaaaataaaatacagtaaatggaaaatatgaaaaaaagctggaaaagttcaagttttagagtaattacaacgtatattcctggattatccatcgtaaagatgtattctcagatggggcggaaaaacaagatacaaaaaataggttataagagacacacttcaaaagaagttggaaataaaaggatggaagagagagtacacaaatatgaaccaacagaaagcagtggtaacttaaatatattattaaagatgaagaggaatgctatatattgataaagggaatatgacaagaagatgtaaccataaaaaatggtaatctgcaatatagtttgaaaatatatccagcaacaattgacagaattgcagagagacatcaacagttgtagctgaaatttttaacacactgttctcagaaattagtaaatcctacagttgaaaagcaggcagaggtggagaaaacttgaaaaatacaattaataagcatgagctgttaggaatacacctaaaactgcatacttgagacaatgtgtattttttaagctcgtttggagtgattataaaaataaaccgtgtattatgccatataagaagcctcaatttcccaggaatgaaagcaataacaaattaggttcactcagtataatgcaataaaataagaaattactaataaaatgatagtccctaactcccaaaaaaccgcttgtggttacaaattaaataacatatttctaaatagctattgaattaaaaaaataaaattatgatatatttagaactgaaagacagtgaaaacatgacatttcagatttgtaggatgtagttcaagcagtacttaaaaggactttatagcttaaataaacatagtttattaaacatatagtttattaaatattaggaaacaagaaagataaaaaatgagccaaaaagttggtaaaaagaacacaaagcaaatttcaaggaaacaagatagaaaaataaaggtaagtacagaaagcaatgaaatacagaataataataataacacctgacatgatagagaaggttaaaatcaaaacttgattctttgaaagataagatagacctctgacagactcaaaaagaaagaaaagagaagctaaaaataaaatacaggacaatgctggcacctgtagtcccagctgctttgggaggccgagacaggataattgcttgaacccaggaggctgaggttgcagtgagccgagattgcgcaactactttccatcttgggtgacagagggagactctcaaaaaaaaatttattttaataaaaaatacaggacaatgacaaaaaaggaaatagctgtagaccaaagaaattttcaaatgattttattggaacaaaatgtatacttaataaatttgggggaaaagctaaataaaatgaataaattctcagaaaaaaatataaaatgtaaaaattatcctaagaaatacagaacatgatttcaccaatacatggtaaagaaatggagaaagtagtcaaaagctttcctcccagaaagcacctgagagaattttatggttgagttctactaaactttagaaagttggttcttttatgaactaatccagaaaacagtgaagagagagatgttcagcaattttctgaagttaatgaaacctcgattacagtacctgtgaatgtaacagtgtacattaaaagagtgaaggcaaaaatgcgattatctcaagcagtcactgtttaggagacaaatctggatttccaagcagaaggagatataatataggggatcaggtactttaaaagttgtaagcgttggagaagcagttttgggttgtggggtcggtggtaagatcacatgacaatccaggagacaggaagttgctactactgtcacttttattacttttttttttttttaaacctcacaaggggataactagacactggaatatagctgggcccagcaaacacatctctccagtcttgctttcttccatccgctgtagcaggaaaatggcctctacttcacctccctcttccggaggtcatgataaagcatctaaattgcatccagaaccttagctacaaaggaatctgggaaatatggttgttatctgtcagacctattcaacagagggagattgaaatggagtttgagagatgcactataaagtatgtaccacaaatgctcattacctctgctgctacttaacatagcgttttcattttatgtcctgatcagtgctatccaggaagtaaagcaagaggcatatggatctaaaggaatagataaaattgtcattacttatagaaagtatggtcatcttaacagaatttagtaaactgattactagaactaaagagtacaatgacattactgtgtataaacagtcatctcttggtatctggaggggagtggttctggaacctccctcagataccacaattcacagatgctcaaatccctgacttaaaacagcttagtatttggatataacctgtgcgtattctcctgtgtactttaaatcacatctaggtaacttatacaacttgatataatgtaaatgctatgttaagtagttgttatattgttcagggaataatgacaggaaaaagaagtctgtacatattcagtacaaatgcaattttttccgaatattttccatccacagttgatcagatccatagatgtggaacccacagatgcagaggatgaactgtacatatgatcaaactataagagtcaatttattctagtagtatccaattaaaaatgaataaaaacataagatacgacttacagcaacgaaagcaatataatatctatgaattaataagaatgtataaaaatctcttcagggtagaatttaaaatgctaataaaagaccaagattatctgagtaaatagagtttttattctcttggaggtagtcgtaaaaaggtgtcagttcttcacaaaatatttaaaattaaaccccagcatttttattgtatgtttttgggaacttgataaacttcttcttttttttttttttttttgagatggagtctcgctctgtcgcccaggctggagtgcagtggcgcgatcttggctcactgcaagctccccctcccaggttcacgccattctcctgcctcagcctcctgagtaactgggactacaggcacccgccatcacgcccagctaatttttttgtattttcagtagagacggggtttcactgtgttagccaggatggtctcgatctcctgacctcgtgatctgcctgcctcggcctcccaaagtgctgggattacaggcgtgagccaccacgcccggccgataaacttcttaaaaacataaagcagtagaggaaaattgatccacttgattttatcaccattacagattctgttcaatgaaggtatctgtagacagatgggcagatgacagaatggaaaatgatgtaggtgtatggaatgtccacaacttagattaacaggaaatctttgtctagaactgcaagaaactactgccaaaaaaaaaaaaaaaaagtgattgcaatccaaggagaaaaataagagatatgaccacacacttcacaaaacagtgaacgcaaaaggctaaccagcataggaagaaatcttcaagctcattattaccgagagaaataagaatcgaagcagtaaaatgatatccttattacactagcaagagttggctgaggatggtagatacaagtggggatgtgtgaacataggaattgtcatgcactggtggtgggagtgtagacttggcacctatactggagaacagaagttgctgaattaggcccagaaatactgatcccacatttattttcccgggtacgcatcctaggaacacttttagataattgaataagggatatgcctgaggtatagcatcattaaggcaagctgcccttgtcgtgaagtatttacattgttaggttttttaaaaacactgaggatttggtcacttttcgtgttatctacttaaggagaacagtgctttgatgtttgtttattagctttgcaacctcgacaggtatttatcctccattcctcagcggcttcgtgggttgttgtgagaatgaaatggcttgatacctgcaacaggattagaagtacttgtgagagtaaatgcctagtcagtagcagctattattgtggaattattcctagaagccgaagcactgagttgattggtatggactttccaaaggctcatcttactttgaatatttattgtgtgctactatgtgtcttgacgtttagactaagtggtcaaaaattcttgtcctggtgctagaaaactaccacagtaaatggaaaaaaggtaaatgaggtacatgctagtcattgctaacagatgaagctgcagttggagttaatggtaaatgtgcttaacttttgggttatctgatctgttttaattcttcgtttgtatcattccagaattgtcaggaggagatggtaaacctctgagggttttctttggttcttttttggttcctaattgagacaggctagagggctgtgcctttgatggctgcataacattctacatggttctttctttttattttctattttatttatcttttattcatttatttttcttctaaggcagggtcttgccctgttgcataggctgcagtgcagtggtgcggtcatagctcattgcagcctcgaactcgtgggcccaagtgggctgatcttcccacctcagcctcctgagtagctgggaccacaggtatgcacaaccatgcctggctaattttttgattgtttttttgcagagaccaggtctcactatgttgtccaggctggtctcaaactcctgagctcaagcaatcctcccaccttagcctcacaaagtgctgggattacaggcatgaaccactgtgtccaacctccgtggttctttgaacaatgatcattaagagatttgttgtttgaaccagtgtcattattgataatggataaatgcatttaatatgtagtttaatatgcatttaatttaatatgcatttaataaatgcataacttcatatgcatttaattgtagtcagctactttaggtaactgatatactctaatgtcccagcctccctccagatgaaaataatgttgttcttctcagtgttcccactgctctttttccctctattaccatagtaatcactgttcttctttatattgtggtatatgtatatttttttctcactagattttagtttcttctggccggagaccatgggtgattcacctttgaatccctaaaatgattaacattcaagaagtttttgtcaaattgaattccctccttcccccttggtatcatttgtgctctcttctgggaaatatttaaaatgtctccaaggttattgatcactacattctagaggacctcagaaatggttctcaccagccacccatgttaaagggcagacctgtggcagacagagccattataatttatgactctttctgtggtgacagatagatgtggcctttggtaggctccctgattcaaaatggtttatcctgagctgatgtcatctttgggagtacctgtaatggatctgatcaccggatcccttcaggcaccacacaaattccagcaagttttgcccctagctaggagcatatatttattctacattgctaatagacagaaaatattttcccaaaggaattataggcaatttgctttagtatctttatttactatgcaaataaacatttatttttagtttaagttctctaatttattgccgaatatttagtgtggcatatgttttttttttttttctagtaactcattaccatgagtggttcttgggccttaattttctcatctgaaaaattaacgagtctgtatttttttatatttactcatttaaaatttatatctcgcttagttttaaatgttttaaaaagtgtttaaagttagtgaaaagagtacagagaatacaaaaacaaatactatatccagtaagttagaagcgagaaaaacaaggaaaaacagaagtcggaattcaaacgagaaccagaagtaaggcagatagacaaatgctgagagcctggttcatctgccaggaccgtgcatgatttgagtgatctgctctctagcaactaccagggaaaaggaatcccagtcagtcacctggttcccaaggttcatgagataatctctgagaagtacaactaatcatggtgctgggaggagaaggatatttctcttgagaagtctggaggagagcactgtgattgaatgagcccgaggctctgcacttcacggcccctcaggcctggcagtatttggagatcctctgctgctgaggccagggtgtctgtgcccacggttcatcattggtgtctgctttgcattcttcaaggcaattttcacttccaacgtgatctacagaagtgctcacaagagcagaccctcaggaagtggcagccatgactatagaattattcctggaaatcaaagcactgggttaattggtatggattttttttaaggctcatcttactttgtttgaatatttattgagtgctactaatgtgcttggcttttgttaactttcggaggaaaaatttgacctcaggcttgttagagtctgtcctttgtgacacgcagttggtacgttgtttattttatggttaatgtgtccacttggtgcagcttgtgtttgataaaccaccatctccttttcctctgtctcccagaagttcagagtgtttttctctcactttggccttaggaccattattttctcttaccagtctgttttctttataattctaaatcacacacaccagctccatcatttgagagaggtggggacagaaacaactggctcctacttctctgtgtcaccaccagtgtccagttggtttgggccaagccttggactgcatgtttcctggctttttaagtatcccttgactcaacctttttggcatcaggactggtttcatggaagatagtttttccacagcccagtgggcagggaggtgatgatttggggatgaaactgttcagatcatcaggcattagttagattctcataaggagtgtgcaccctagatccctcacgtgcacagttcacagtagggtttatgcccctatgaaaatcaaacgccgcctctgacctgacgggaggagttgctcaggcagtaatgcttgcttgcccactgctcacctcctgctgtgcagctggttcctaacaggctatggacgggtacccgtccacagcccggagttggggatccctgccttaactaagggatccctttcccccaactcttctctgcatcttgctggatgaggaggtttcccatttactccattactctttcaagaaagtctccaattctgtcttatctggaaatacttcttgttttctaatgataggttaattcataacaacatgatcattaacttatgtcacagtcgcagatggcagtggcccggccatatcctgcagtctcacgtaacgaggcctgtgagagtcggtgtaatttactgcactgatgggtccctaaaggcatttcaggctttgctccacaaagtactctcttttagcacaaattaatgttctttgttttgttcagtgacttttgtcaatatataaatcttagaatttattataatcacagtttgcttgcttacttttcatgcatgcttctttaatccagggtgatttatgtgtttatgcatgaatttttctgtcagaatatgaactgagatatttgcacttaaagtacacacgtttgttttacattttctcacagagctaatactttgttttcccaaaatacatttacttaatgaaattcggatcttcatgttgagatgttcatttttaaaatttgactttagttatgttaaccaagtctgcgttacttaatttaatttggagtcgacttactgaagttgataatttacttaaatgtaatagctgaactgcgtaaattttaaaaacttatcctagctatttgatattaccaatctataaaatcttgattttgatgttgttgttcttactgtagattatctttgttattaagagagcagctttttaatttttaatttttttttgagatggggatcttacattgtcacgcacgtgggggtgcagtggcacaatcacagttcactgtaacctcaaactcctggattcaagtgatcctccagcctcagcctcccaagtagccggaactacaggcccgtaccaccatgcccagctaatttaaaaattttttttgtacagacagggtcttgctgtgttgcccaagctggtcttaaactcctgagctcaagtgatcttcctgccttagcctcccaaagtgtgagattacaggtgtgagccacgacatctggcctgaaagcagccttttgttttacagtttgttctaagggaattcaaagctccacatcttttaacgattattactatttgatctaaaacctttttgaagtaatctgctttgaatcatgtgaggagctcaatgaatataacattcttggtaatcagagaatgggattaaatttttaacttggatggagcagttccagcatgagttatgacgaagtgtctagtgacctgttttctaaatgttgaattaaatctgctatctgtattttaaaagctaatcggtatatttctacctagcccttaaaaagccatcactcatactctctttccatcccatcccatcccttctcttacctaagttacttacttgctatctgctgttaggaaaaattttaaaatccacttattgaacatgtacgtacacaagattacttggctaactatcaatgccaaacagtcagtgaaaggacaccctttaaaataagacttttacatcagcaagaaatgactagtatattttattcaactcaacaaacatccactgggcacttatgttcaaagtactgtgggtgatagaactaataagttagtagtttctacctggaagtaactcacattctttttaaaatttttttggtctgtttctttgtcagacctttagtttgtttaatggaatgtcacaaatttcggtcaagtaaggtgtttttgattgatggcagttctaggcaaaaacgcctcagtgaagatggagagcccatttgggatcaggatcatccagcccctcagagcaagagtatggagatcatattcacagtgggtaccaagacctaggcttggcgtaggcatcacttctgactggggaatttcctataaactgcgcagaccaatgaatgaccacagaggagatagctggcgtgtgcgagaaagagcaaagattaagtgagcccaacataagagtgcctagcaaatcgtctcactgtgtgtgagcccaatgcatggtggcttctattattattattttattctgacgagctttactcagtgaagataggcaactattcagtcatctatttgtcaagtgcctgtaatgtaacaggcgtgatactaggtatagaggatttaacggtgagctaggcaaatccagtcattgccttcacaggactttcacttagcaggggcttcagacaagtgcgtgggctaaacagttgagtaaacgtaaacatggtgaaaaatagagggtgctattgaaatgtattcacctgaagaagggaggaagagattcctggaagaattccattggaagacatgtttcagttgaaaagtaagtaggaattgattagaataggaggtggagagagaggtggacagtgttgcaggcagacggagcatctggggtgaccacccaaaagtgagggacagtgccaggccccaggaactcctttatgcagcccaggcacagccaagtggggcttggtgtgggccctgaccctcagtttgctatgaaaatgtctgggctttatcccagagcagtggggtgctatagttgagttttaaatggggtgcttatctgatgaaatacttaggaagattaccctggtctcagagtggagactgtgctgggagggtggaggaagagtggcagaataaaggcattggtgggacgatggctggagctgagcaagggactgacagtatggcctgcacaggcagaagaacacatgtgattacgcagaggcggggccggtggggccagagagagcctcagggggctgagcagagcacccttctctgctgggccagccttgggatgatttatcagcagaaaactggatggatctgtttgttcaagggcccagggaagacaggctttggggagcccccatcacaggctgaggacaacagatgcagctgccccctgagaaacaacagcctccacgtgtgcacctcgggaagaagtgagtcacagtcttctcagtcacacccagcacctgcttaatggccacttcttccagagccagcctttgaatatgaaaaaacaataatcaaatgatcttcttcccaggagttgagtcggtactcctgattagctcagggccaacactaaaactagaaagctggaggctttctgggagccaggctgcgtggtggctgatgtggccacataacattgtgatttttgacccttccttttctaagtcatgctgagaacccttgaagccccctgctgttcttctgttttccattttctccttccagtactcattaaaaaataaataaataaactgaatgtgtaattaagcactatgttttgtgtcctttttatgacaggttcatcaattctacatgcatttactgaatgcttactaaaggcagggctgtattttacatatcattctttgtgaagctactgttttcacttcggttctgcagataggttgggtgttgaagaatttgtagctgaggatagactttgcctctgcagctatccttcctgatcagactagacatatacctgattttttttttctttttttttttgagatggagcctcactctgtcacctgggctagagtgcagtggcacaatctcggctcactgcaacctccacctcctagattcaagcaattctcctgtctcagcctcccgagcagctgggattgcaggcgcctgccaccatgcccagctaattttttgtatttttagtagagacagggtttcaccatgttggccaggctggtttcgaactcctgacctcatgattcgcccgcctcagcttcccaaagtgctgggattacaggcatgagccaccgtgcccggctcacatacctcatttgaccctgtggtgtgaagttgctattcctactgttgttaactgatggcagaacgtaggtttaaggtaaccaacggggctagcatgcttgttgctgaagtatatgaatgcgggaaaaactcctggcctccccactatgcccttggctctggtcagtgctgggtgcagcgtgcctgccatttgcaaagcaaaacctgtaatcccagtccgcatcattcccctccacgcatacattttatgcagctaaagtagtgtataaagtagctgatggaatactgtactgcctggcttcttgaaatttagaaggaaaacatttcatttaaagttacgaaacaaaccaactactcaaaggcagaaataaggagacagatgatgaaaggtgacagaaacttgactgatatgaccatgttagaattacagaattaagaagagaagtaccaattttacaaattacacgaaaggcattttctctgagttgtagaaagtgagtgtgagctgttgtgtgggagcctcttggtagctgtgaagtacgggtagtcatgtctggagttaccctttctgccccacttccagttgctggaatcatcacagcctcccattcctgtgcagcctaaagaatgcctcctttgcctcttacaagacagattcttacgttgaagttgacatctgccacctgactgccataaccaaataccctagactgggtggtttaaggctgggaaatcagagttcaaagtgccaccagctgagtttctggtgagggctcccttcttggcttttgtaggtggctgccttctttctgtgtcctcacatgcctttgcttggtgcatgcatgtgggaaaagggagacagcacgcatgaattctctggtgtctcttcttgtaagggcaccaattccatcatgagggcccctcccttaggacttcttctaacccttattataatgcctcccaaaggtcctatctccaaaggccatcacatcaggggttagggcatcaaacgaatgaattttggggggacacaaacatcagtccctaagaacatctaatttgatgtttttatttaagctaaaagaatgcattttaacattttcgggttggggtgaggggggacacccacattggctgtagatagtgctttttgctgggttttgatttttcaggatgagggaaaatcgatctagagagaaacaatgaaatttcattaagaacttcaaagggactgtcttcataaaggcaatagatgtgtttagagaaggtttgggggatcaacttataaagagcattcaaactcttcattttttttgttctcccagatttatgggaatgtagtagaaacaggcttcccagtctatcatgtgtcattgaaacgcaaaacacaatagcgtttgtcttgttacaaaccaggaggctgtaaatctattatttattttttattaaaggtgcaagttccagagtgaggctcatgaatagcccagagaaataggagatgaagcctttcatctctgttctgttcttccccatgtgagccaggtcaccagtgattgaatgggctttctgctcttgtgaaatatgtttgtttacctggactatgttcaaaaggtaaagaaacaagaaaagggaaagatgaggaaaatcacaaacctgactttacatttcagatccagtttcaaattgtaattagaaaaagcaacattatttccagctgtcatcagaattttctactagaccaggtgtgctttggatctcttaagggatattataaataatgtagaataataatgctgtgccattcagacttctcttttatgctcatcacccccaaataggctccttggcgtcaccgttgtttacggagtgctgacagtggccacacccaggtgaaagcttctggagttacactgtgtacttctgtgtgactctgagctaggtggggccatctgcaagtgagataagctgtgtgttacctggttagagaaagcctgtgacttcctcaggggagtcgcaggtacacaaaacattgagcaaagaagtccccgtttgcagtggtccagttagagatgtcttgctccttgctatgtttgccttttgaggaactgatctagttcatggctatccagaaaataattggattttttggttgtactttagtaaatctgccagtatctttaatttcctagaaaaatgtaagtcataatatattctgtcatttttctccagtgtaggcaacgttatcgatacccatgtgacttatgcatggtgtgtatgtggctgcattttgcctgtgttgagccacgtgcacaaactaagaagtgtttcttatttgctagaaacaggagcttcagcattttgttcctgatgcttccttgattcaggcagaaggtatttacttgtaaattatatacagtgcatagtctctgcaaagcagaagttggttactatttgccgggactgcttaaacctgccctttagagtagcagtttagtttcctcatagctggtcgggcacctgaagaaatagtagacttttgatgtgtatccttttgcacttcaccacggtggatggacttccatcatttttcatcgatgcccttgtggccaccccctgacatgactccttatgcccaatccaccttgcaaagagaggacagcacacacatcctcctggagcctggccatactggaagatttcgcctgcctctgggccccattctaaatgaaatccacacacactcctccatctggaatcgcagacctactgcaagacccccatagcccacctttttattccctttccttacactactctacaaatcatcacatggtcccagtaacaatgagaatagctaatagcagcgctctgagattggttctgttatttacaccattttacagacaaggaaacagagacttgaaggataggtatccaggccaaggttttacggcctgagcgtcatagcatcagagtggcccatgatgtctgaccatgcaggtcttcactgagacgtgctccctttactgttgcccctggacttcatgggctttcatgccctacaggatggctcttttcatgctcttccctctttcttcattgtttgtgcctccacctcaagggtaaccttctgtgcagtaggtccatgatggaacctccctccaggtaatcctcatggaactcacttttgcttctgctctttattgaacctgttttgtgtcagatactgtgctaggagctgtcaatgtctgttaggttaaattacaaggacataaactgagaactgagcccttgaagtgctgtgaggaaggcattttctgtgttagtaacgagtgcactggcttgcattcagcttttgtatggtcatattgtcccccaaccatgttagaagcttcctgagggcagaaactctaacttcctcatctcctgcattgcctggcagctcctgtcatgtccgtacgccttagaggtgtgcggtgactgcattgctgatgtggtttaaaggaacctggagctcttagagaaatgattagaaggagcaagagctgagagactagtgaaatttattctttccactcaacttacagtgagagaggtggcaatgtttctttcttttcctccttcccttgtttttttgtattcatcttgtatattttctctctctaatttgcattattttttatcaggggaacccacccccaatatttcaacataggttctttctattttccattagcatacaaagagaggaattttacagttgggccgccgggggtgacatcacatatcggtaggaccatgatgcccacctgagccgcaaaaccagcaagttttattaaggatttcattaaggattttattaaggattaaggggagggggtgcaagaacagggagtaggtcacaaagatcacatgcttcaaagggcaaaaaggagaactaagatcacgtgcttctgcggaaacaggacaaggcaaaacagaactactgataagggtctatgttcagctgtgcacgtattgtcttaacaaacatcttaacagaaaacaggattcgagagcagaaaaccagtctgacctcaaatttactagtacagggtttcccaatcctggtaagcctgagagtactgcaggagaccagggtgtatttcagtccttatctcaaccgcataagacagacactcccacagcagccgtttatagaccaccccccaggaatgcaattcttatcttagggtcttaatattccttgctaggaaaagaatttagcaacacctctcctgcttgcacatccgtttataggctctctgcaggaagacaaatacggctctttttgcctcaccccacaggcagtcagaccttatggttgtcttcccttgttccctaaaatcgctgttattctgttctttttcaaggtgcactgatttcatattgttcaaacacacatgttttacaatcattttatacagttaacccaatcaaagtggacctgaggtgacatacatcctcagtttatgaaaataacaggattaagagattaaagtaagacaggtgtaagaaattataagagtattattagggaagtgataaatgtccttgaaatcttcacaatttatgttcctctgccgcggctccagctggtccctccatttggtgtccctgacttcctgcaacaacttttcctatataaagggggcttatgaaagtactatcttctactgaaactattccaataaattgaggaggagggattcctccccaagtcattctataaggcagcatcatcctgatagcaaaacctggcagagatgcagaaaaaaatgactttagccaatatccttgatgaacgttgatggaaatatctgcaacaaaatacctgcaaaccaagtccagcagcacaaaaggactccaccatgatcaggtaggcgttatccctgggatgcaaggttggttcaagatatgcaaatcagtaaatgtgattcattacataaacagaactaaagacaaaaatcacatgattatctcaataggtgcagaaaaggcttttgataaaattcagtatcccttcaagttaaaaactctcaataaactacgtgttgaaggaaaacctcaaaataataagagccatctatgacaaacccatagccaacatcatattgaatgggcaaaagctggaagcattccctttgaaaactggctgaagacaaggatgccctctctcaccaatcctattcaagatagtgttggaagtcttggccagtcctggttgtggaaacaagggaacacttacaccctgtcagttggaatgtaaattaaaccatttggaaagcagtgttgcaattccccaaagaggtaaaaacaggcaaagaaagggcatccaaagagagaggaagtcaaagtatcctttgtttgcaggtgacatgattctacataaaaaaactgggtaaagtctgccacacccagaggtgccttgggtgagtcatcatcttggcccaaagtgttcttcagctgataaacaatttcagcaaagtttcaggatacaaaatcggtgtatgaaaatcattagcattcctatacaccaacaacatccaagctgagagccaagtagggaatgcaatcccattctcaatagccacaaacataatgtaatacctagaagtacagctaaccagggagccaagagatctctacaaggagaattacaaaacactgttcaaagaaatcagagatgacacaaacaaatagaaaaatatttcatagtcatggttaggaagaatcagtatcattaaaatggccataatacccaaagcagtatacagattcaatgctattcctatcaaactacccataacattcttcacaaaactggaaataactattttaaaattcacatggaaccaaaagagagcctgaatagccaaggcaatcctaaacaaaaagagcaaagctggaggcatcatgttacctgacttcaaattatactgcagggctacagtaaccagaacagtatggtacttgtacaaagacagacacatagaacaatggaacagaatagagtacccacagataaggccatcacacctagaaccatctgatctttgacaaagctgacaaaaacaagaaatggggaaaggattccctattcaataaatggtgctgggataactgactaggcatatgcaggggatttttttacaccatgtaaaaaaatcaactcaagatggattaaagacttaaatgtaaaacccaaaactataaaaactctggaagatgggctgggcgtggtggctcacgcctgtaatcccagcattttgggagactgaggcaggcggagcatgaggtcaagagattgagacgatcctggctaacaccgtgaaaccccatttccactaaaaatacaaaaaataggctggatgtggtggtatgcgcctgtagtcccagctactcgggaggctgaggcaggagaatcgcttgaactgaggaggcagaagttgcagatgagccgagattgcaccaccacattccagcctaggttatagggcaagactccatctcaaaaaaaaaaaaaaaaaaaaaaaaaaccaaaacaaaaccctggaagacaatctatgcattaccattctggacataagaactggcgttaattgtatgatgaagatgctgaaaacaattgcaccaaaagcaaaagttgacaaatgggatctaattaaacttaatagcttttgcagagcaaaataaactatcaacagagtatgcagacaatctgtagaataggagaaaatattggctaactatgtatctgacaaaggtatatccagtgtctataaggaacttaaatttacaaaaaaaacctattaatcgaatatgataaatcagtgctatgaactaaacagatgctaatcactattattaattagtgggcaaaggacatgaacagaaacttttcaaaagaagacatatgcagccaacaagcatatgataaaagctcaatatcactgatcactagggaaatgcaaatcaaaactacaatgagatgccatctcacattagtcagaatggttatcattaaaagtcaaaaaataacagatgtgggccaggttgtggggaaaggggagcacttacacaccgttgtggggagggtaaattagttaaaccattgtggaaggcagtgtggtgattcctcaaagagctaaaaacagaactaccattcaacccaggaatcccattaatgggtatatacccaaaggaatgtaaatcgttctacgacaaagacacatatacatggatattcattgcagcagtattcacaatagcaaagacatggagtcaacctaaatgctcatcaatgttagactggataaagaaaatgtggtacatatacacctcagaatactatgcggccatgaaatagaatgagattgtgtcctttgcagggacatgggtgaagctggaggccatcatccttagcaaactaacacaggaacagaaaaccaaatatcacatattctcgtcagtgggagctaaatgatgagaacacatggccacatagaggggaacagacaccggggcctacttgagggtggaagcctccctcaggtaggcctgtctcaggtagatctgtctcaggtaggtctccctcaggtaggcctgtctcaggtaggtctccctcaggtaggcctgtctcaggtaggtctccctcaggtaggcctgtctcaggtaggtctccctcaggtaggcctgtctcaggtaggtctccctcaggtaggcctgtctcaggtaggtctgtctcaggtaggtctccctcaggtaggtctgtctcaggtaggtctccctcaggtaggtctgcctcaggtaggtctccctcaggtaggtctgtctcaggtaggtctccctcaggtaggtctgtctcaggtaggtctgtctcaggtaggtctccctcaggtaggtctgtctcaggtaggtctgtctcaggtaggtctccctcaggtaggtctccctcaggtaggtctgtctcaggtaggtctgtctcaggtaggtctccctcaggtaggtctgtctcaggtaggtctccctcaggtaggcctccactctcaagtaggccccagtgtctgctgtggagggtggagggtgggaggagggaaatgataagaaaattaactattgggtactaggctttgtacctgggtgacaaagtaatctatgtaatgaaccctcgtgacatgagcttacataacaaacctgcacatgtagccctgaacctaaactaaagtaaaaaaaaaaaaaaaaaaaaaaaaaaggtaccatcagggctagtctgagacttcagggacttaattcctcattgtaattttgcaaataaaggaaatagagttccctttcacgttctccaggctcttcagcctttagtcttccccagcaacccctacctgctgttttccaactcagagcgtggcaacaactttatcattaagacctcagagatgctgagtggaagagaagtgtgtgtaggaaaaggggggcagataaccaagcaatcgtataggtaatgatcatgcatctagaactccgaagtgtgctgcagagtgcattcccaagtccttccttctgtgacccaggtctagtcctaaatgcagagggcaggggtagggatgggagtaaaagcatttggacaaggaaactgatgttggagaccggaggtatcggtgtcaacactctgcaggcctccagctggttcctgcgtgtaggccatgcagcagctcgaccttgtttacagctctcgggctaatgaggattatcatttatgcctgagagtatgtaaatttggcagttcctgctctaaaataacattctccatctttccgggagtaaactgctttcttagtaaacaaattttcagtgcattatgttaccatttagaaactttcctcttccggtgccaaattgctcttaaaggtgagtgattcataaaggatattttatttaccttgaactcagcttctgtttggaacagtattagaacacaaggagagtcagtaaaccatcgctggaaatatgtgaggagctaagacattggaatccacatctgtatttagatcttgagaggttgcatctgtctagttcatagcactgatttctttatcattcactgagtaactagtaagtacaaaaccctctacttggggagttccttgagatacagaaatgaataacatatcagtctctggcatctgtgcttctacactttggagagggaaataaaacaagtagtaagaggcaggagtcccaggtgccccctgagaggcatggcatgccacagaaggcattggcaggaagactgcgtccacctgcttgcagggtcctgtgaatgccaccgagagggcggcatctgcaacagtagaatttatttcactggagaaagaaggtggcaggcatttcaagtggagggaacaataagagcagaagaaagcatgggactttgtggagcacagagaggccttgtttgcttggagtgaaggtcccgtatcagcagaccaggaaggaataaggctggaaccccagtttggggtcagactccaccccaagtccacaccattctgggagggaacggaatgccaatctaaggtgccagggagaagtgtttgaagtttgtacagcaggggaaagacatcgatttgaatactttttcccttagtatgtttttgcaaacctattttggggtattgtaaaaagattctgtgcttatatgaatttgggaataaacaggtgcttgctgtaaggcttcttagggcccttaatatgctttgtgactgtaggaggggatatgttgtgtcatctccaaacgtatttgaccatgagatctatttgaatacaaacctaatgcacctctttggatttccttggcttcctcctccttgcctggcgttccctgtctagtttcacgtgaaaccccatcccttcaagccccacatgacccttcattctggaccttattctgattgagctttcacttcgtttctggacttggataaaatgctgcaaacagggttgctaagcggccaccaagggctgcctggccccacctgaagtcccctgtggggccgctccttgagagttgaacctttatcaatgggaaccaggaaggatcctggccaggtgctttcccattctttgttgttccacggactgctccaaggtatgctggcttctgagagaactttccagagaagtcgcacgtgcttgggcgtgtccgctgagtgagctggtgtgtttttgggtctgtgcccttgctgaaattggggtgacccatgacttcacgttattttttttttttgagatggagtctcgctgtcccccaggctggagtgcagtggcgcgatctgggctcacttcaagctccgcctcccgggttcacgccgttctgctgcctcagcctcccgagtagctgggactacaggtgcctgccatcacacctggctaatttttttgtatttttagcggagacggagtttcaccgtgttagccaggatggtcccgatctcctgacctcgtaatctgccctcctcggcctcccaaagtgctgggattacagacgtgagccaccgcgcccagccaacttcacgttttgagtgatccactgcctcacatttttccttgcttcctgtgcctgtttccctacatcctgctgccctagttttgtacttccgaaataaaacatcagcatgtaatccttgcctcagcctctgctttccagaggacctgagcaaagatagactctgactgagtgctagagacgggtgtttcacagactcactttggaaaatggctacgtaggctgaactcagacattgagctttaagagtggctggttttgtaatagaccagacaagaaataaaataaggagaggaaacaggtagttgatgaagtgaatcagaacttgtaataaagctagagtaatggatttaagagtaggtctcatagagataattgatgaaagaatgagcgtataggctgcataagttgaggggataggtagaaaaaagagatgacaacattaagcatggaaagagagagaaggaggcgctcttgataaaggactgatggtagctggaggagtggagtgccagggcacaaagctgcaagagccctgaagaggaagaggaagagggtcatgaagaaggaaattgatcagggtcctggattcctgaggtacatggtcagtggtaacagagaacagagggggcatacagcaggtgtgctgaggtggctctgagagacgggagtttggtaggggagggaagaagggtggttgctagacagtacatcaggattgagcacagcataagagatgaaacgggggagaaatctaaagacaggtgtgccacttttgcctctaaacatgtggtataatttttgtcagcgaggaaataaatctgtttctcttttccattttccaagaagggagggaaagagattagaagtaagactgacatctcagggcctctaccatttctttgttgctaaaggagacacagtatgtggctctttgtttcagcaaaacactaatcagctttcggatatgcaaatatgggctgcagagctgattgagtggaagagagctacattgctgtgctaagtaaaggaagaggaattgcctttgatggtggggctggcccaggagagaagcagggaggtgtgtagagtcgctgggggagagagcgctgagggcttcaccattgcctaactctcagtgaagtgtgccacacccagaggtgccttgggtgagtgtcttggtggaaaggaagagaggtaggatttaagtcatacaaaatgggctaagttactgggtcaacatagacctccgaaagagcccgccctaggccaggagtcatgagtgggaggaagtgcacccagtggaggtgaccttgagaatgtgtttcttaggaattcacagcaaattgaggagggctcgagaccccccatgatatatagaaatagaggacagggccgggcgcggtggctcacgcctgtaatcccagcactttgggaggccgaggtgggtggatcacgaggtcaggagatcgagaccatcctggctaacaccgtgaaaccctgtctctacaaaaaatacaaaaaaaaaaaaaattagctgggcattgtggcgggcgcctgtagtcctagctactcgggaggctgaggcaggagaatggcatgaacccgggaggtggaggttgcagtgagctgagatcgtgccactgcactccagcctgggcgactgagcaagactccgtctcaaaaaaaaaaaaaaaaaagaaatagaggacagaagcaattttgttacagtgtctaaggacagagtagccttaactgtcatctgggtatcatgtgggatgtctttatgttttgggggcaaggggaaagcactcactgaagacagaagctgccacttgagcagggaggtgacatgtgctggagctgttgtgagagccagcgtattaagggttctgtaagagatttttttggtaagcgttgagagtgcatacagagtgagcaggcattgtggtgaagcagacagcatagtgctaacttgaggtggaggaggaggaggaaggaccctgggcacagtgcagacatctgggctttgggctgaggccctgtcagagagtgattcttgggcatgtgtgaaaacctttgttgaaagggtccagaaacaatggctaagtcctaacagaactctgctgtggacctagggaaaaggaaagaactaagaatttagcggtcaatttgaggccaaagacagaggagaaattgagggtcagaggggatttagagtttgagattttaaacatttgctgtttgtattagtcaagattctccagagaaacagaacgtgtgtgtgtgtgtgtgtgtgtgtgtgtctaaagagatttattagaaggtgttggcttacgtgattatggaggctgagaaggcccatgatctatcagctgcaaagtggagacccaggcaagctggtggtgtagttcaggagtgttagagccagagagccaagggtacaggttccagtatgagtctaaaggcctaagaaccaggagtgccaagtacaggagaagattgatgtccccgactgagctgtcaagaagagagaaggcagtgtgaatccaactttcctccgctttttcagcccccaatggactggacgatccctacctacatcggggatggccgtctgttttactcagttcaccaattcagatgctgatcttctccggaaataccttcacagacacacccaggaatgatgtttaattaagtatctgggcaccccgtggcccactcaagttgacaaaagtacactgccccttggcctttcctgagtgttatctagctttccatgggtagacatcagctctccacatctaaattgtaagctgctccagggcaggggccagatcttctcctgtgtgttctcagtagctgacacaattgccttccatgtactaaatgttcagtaaacatgtgttggatggttcattgatccaatagacttatgtctatgccaatacaggcttgctcttgaaaagctgcgggtaaatcaattctttgtaaattgaatcttatttcaaatgtagtagggatgttcagcatttcaaggaatcctaggtcaatctttggtggatctacgagccctgtattctgccattctcgttttacaggtaagggagctgagttacagagaaattaagtgacttattataatctgatttgtcagtcaaatataaggtttcttcaagcaaaacatacctgttacttaggtcaagagggatttggtgaaaagcctagctatgaaatttataacatcagattaataacgttatattttcagaagcatttatttttagtctgcagatatttattaagtttgtttacaacagtcttttagttgtatactaatgagtaaaggctatgctaaattgtgttgcagtttatgtcagattagaaacaaaaaacaacagacacaaagtttctggttcagaaaattcacctctgaaagcccccagctcgaagtgtttagtttttcttctgtgaggtgtgagaggatgttgaatgtgctggacaggtgccaggtcctgcgatcctgcagggtgcgttcctagattcattgttgaggtgatgaaagtctcttcagtcagtggcttaatgttaagtgtgagaaagatgttggaaaagatttagggagaccttttgggcacctcactgatggaattattttaaattgagcaggttttatcaacatctgtattgggttgatttagtttctccttgctatcagttctagaataaaatagtttattatatgtgagaaaattgataaaagtgtaaagctactttgcatcactactttggatgatccaaataaaggaaataaaagaatcaaagcattggatttactctgctttcctttctcttcatagtcatttttatgtgttttggcttatcaaaaatgagatcaaagttgttatatactacaaaagaagctgcttttttatttaggattttagtatcttgacatggagcagtgaatcagatgtggggacaggagataatttgtattcatattagatcaatattagctaacagctgttttacggacatcaagtcaattctgcaactcagcagggagaaattattaccccctttttagagatttggaaactgacttcacagttaatgtgggccttttgacgtcagtactgatctcacagttggcgtggagcttttgacgttggtactgatctcacagttggtgcggactctttgatgtcagtactgatctcacaggtggtgttggccttttgacgtcagtactggtctcacagttggcgtgggcctgttgacgtcagtactgatctcccagttgtcatgggccttttgacatcagtacttatttcacaggtggtgtgggtcttttgatgtcagtgcacagactcttcccgtgcaccagcaccacctccatggcgcctccccatgtcttttaggttttgcgtatattactattggctgctgtgagcaccatttttggaagtacattttcatattgcatgaagaaatacctgagactgggtaatttataaagaaaagaagtttaatggactcatagttccacatggctggggaggcctcacaatcatggtggaaggcaaaggaggagtacagacacgtcttaaatggaggcaggcaagagagcatgtgcagaggaactgccctttataaaaccatcagatctttgaggactcactgtcatgagaacagcatgggaaaaaaccacccccatgattcgattgcctcccactgggtccctcatgacacatggggattatgggagctgcaattcaagatgagatttgggtggggacacagacaaaccatatcagaagacagttataatatttgcataatacccagactgtgaggaataagccaagtaataagcaataacagatggaatattgaggttatgcagagtctgtgctgtgcatgtcacagcctgcacttgacctgagtcatgtgcttcctgagctctttacagggtgctaggccaggatatacgtgagagttacagtgattggaaaattagttttcctattagtgtaaatacgtatgtgttaggggatagatgatacactattacagacttataaaatggaaaactaaaattggaatgtaaagcttatagcaggtagcctcaggctgtgctcccaaacctttgggttcagtttctttatgtttcttcagttttctgttacggatactggagcagaagttgaattttagtggatttgatgtaaagaaatgggtatatttcaactttcacctcctttcctgttcctttttttttttttttttttttgctttgaagtgtgaatgaataatactatagacaaaatacaatagcaaagacaaattatggataaattggaaaatcaaactctgcagaacaaagattttttagttttacatcatgtaacaaatttaatgacaaactataccaacaagtgaattgacgatttaagatatttcatttagcttccaaaatgtgaatgctaataagtttgaaatcactaaatcacagtaattccttgcattgggcaacagaaatctattaattaaaatgaaaagtctaaagatattttggggaagattgcaaatttcaaataactgtatgtggtatcctccagttccttttaatagtctcatccttagctgcgcatttacttcacaagggaaaccttaaaaatactgataacagagcctcactgctggacctttagatttaatgggtctgcagtgagggctgagtatagcacttttttttttttttttttttttaaggcctggtcttgctctgtcccccaggctggagtgcagtggcatgatcgtagattactgtggccttgacctcccaggctcaagcgatcctcctgcctcagcttcccaagtagctgagactactggcatgtgccaccacacgtggctaatttttgtattttttgcagacatggagttttgccatgttgcccaggctggtagagcattttaaaaaactccccaggagatcctaatgtgcaaagttaagaacaacggtttatatgataatcattctttaatcatattatttgtttaaaggtagattcctgtattttaacattttaactttaaggttgtgatactctgatgaaggcagctcctatcaacctgtaggcagttcaaggtgttaacctttatctttaatgtttttatgtgtcagatggcagttagtataaggattacctttttccttttgcagtgtcataatactgagtgccaggacctaagtttttgaaacctcccagtagcccctttttaaactgctctgagcctgcagggcacagcatgacctagctgttaatttagtactttcatctgattgacctgggaaggatcactggccgcctaggggagaccttcccattattaattcctgcctggatgtcctttatgtgtctgcacagaggtttcggctttggccacgttgtgaaagtcataaaattaaagaaatattttgcactggctgttcacattgacattcagaaaaacaaattgcagtaatcactggggcctcttcctttgaaagaacatgcgaccagtgcctttttagtttatatcttggtagatttgcagtgggtctgctgtacgttgatgggtgggaagtgttaatgatcactgtgggcccatggccgctggaagctatttgtattctttgcactcgtgtggggcatgtgtgtatatgtgcagaggtgttcatatattgcttttgtttgcattttaaacatgaagctcatttttaaagtacttgcaaaatttatccaatgggaggcaaacctttaaattagtgattctcaaactttgagtgcataaggatcagatacagggaacctggggtggtgtctgaagtttgagaggactggggtcaataaatttccacaaaaggtgacttctcttagatgcccggatacagatgacaaacaaggctacagatagttctatacagaaacaaatgaatatatttttaccatttgtggaaattacagttttgaaactgggaagccctttgtatcactatcagctctatttttggaagtaatggaggaagtatttcaacctgattactgcctgtggagtgaggaatttcttagtgtttgactgaccgcctgctgatactttatttctttagagctcctcaagtcattataagaatcacccaacagtgtgaaatcaaaatgatttcttactataaaatgtcagctatctatcgtaaaagattatgtgccatttaaaaatataattgccgtttctcccctctcccccaccttacattcagatgttccagaataacagaatccctgcaaaatgagaaggaatccctgcaaaatgcaaggatctagcctgtgcaaatttcagaaaccgccttctactttaagtcttttaatagtccagataattatcactctgctcactgcccttttctttctctctacctcctcgtcattcttgcgacattttaatgatgctgtttgtgtattgctgctgatgaattctgcccagtgaaggttatttatttatttttccctgagctggattttaccctctgtttacttatgttggtgttctgtttcctttcctaactgctaccagacattcgtttccatgcctttgtataatgcacagcaggctgatgaagcgtggggactcgcgctgtgggaatcctgcttgggtaaatgtcaccgctttatataaagaactttgctctatcgtagctccagaatctgctcagattgccacaccttaacatatgatctgattattaggaagtatatgtttgttgtgttttgaaacactgatgggtttttaatgcactgctgattaatatgtgaaagtgaaaaccagccagtgaataacctggagtccttgtcctcctgccctctgcaggcttgcagggcattgggcagctgggacttgtacctaggacaagattacccatctgtggaaacgcattgctgacacctggacaaaacgagtgttgcaagtggaaatcagtggagatgcagaagagaattttgcctctgtcctgctaatggggaacatatttaacttggtgcagtatctgcagtaagctagtgtgttaggtactatttgaaggagtcttactcatcatcaagttaatttcttgactttaagaacgtatttatgcagcagcccttttctcagcacctctggacttttgaaaagtggccttttgtcttatttctacatagaagcactgcccctgtgcttccctttctggtgtagggcgcatggagcactggggacaaggtggggctgtttctcaaatctcctgcccccaggtctggggatagtatgtgatgcacatgagcttcaccatgcatcagctgccccgttctccaaacctagctttactcaaagaccttggtggtttggaagtgctcagctcatctttgtatacttctacttgttttggaacatcattcctttgaagaaaactttgaagacagcttctcaagatgtttgtctttcctattgccgtactgcattgactagcctcagctaaggacctggactaaaagataggcacccatgcttactggggaacctcttgagtctttaagaatgtatatgcaagcttcaatcaactgatggatgattcccctccaatctcccttcccttcctcctgctcactggccactggcgacacccccaaacaaaaagctgtgtatacgcaagagggcatatggcacagtgggtgagaacgtaagctcttgagacaggttccgggttctggctttgccacttcgcagctcttttctctttctgaacccctgtgtgcccgttttctcatttgtaaaagaatgaagataatagcacttaccatgcctagcataaactgttgtttcctaaatatatcattttaacaactttattgatatataatttacagccatagggttcaccattttaaagtgtgtaattcatgatttttaacatgtttagggagttgtgcaaccatcatcataatctaattttagaacatccccaaaagaaaccatgtacctactaggagtcactctctatctcctcctgcctctctgccctgcttccctatttcccaggtaatcactcacctactttgtatagatttgcctactagggacatttatattaatgtaatcatacatagacggtttttgtcactgacttgtttcactcaacatagtgttttcaaggctcatccatgttgcaacatgtgtcaacacccaaattcctttttattgcagattaataaagtgtgtggatataccacatattgcttatccatttatcagttgatagacatttggattgtttctgctttttggctatcatgaataatgctgctatgagcattgataatacaagtttttgtgtggatgtatgttttcgtttctcttgagtatatacctaaggatggaattactgggtcgtatggtaacttgatacctaacattttgagagaccgccaaaccatttccattttacattgccgccggtcatgtatgagggttctgatttctccacatccttgccaacacttgtaattgtttgtctttttgattctagtcactttactgggtggtttgggtgggttacctcattaattgtgactttgattttaattttcccagtgactaatgacattgaacatttttcctgtgcttattagtctaaatatactattgattgtaagaaaaattgcttactgttttagagataatactgatataagaaccatcagtccctgctttcattagaggggcaagagtgaggatagttttaaaatcaagcatacttaaagaatcatacctgcatctcattaaaagaaaatgttatttctaggtaaagctaaatcatcattaatgtatagggtttactgtttttctagtaggtttatgtgtagagcactcattttgtttggtttaatctctagttgcttttatgttttaatttaacaaaaatgggtgattggaaagatggaaaatacccttgttgccaccacagtgagttccaatttgatttcagcaacgcgtagaagattgaagtcagatgcagccaattttctcccgattactttttttttgaatcttgcctgaataatgtgagctttttcagctagctaattaacactgtttttttctgccatattggtgactttatgatattttgcttgtaattatatatatattcatttatatacttctaccctattcgtaactttatgatattttgcttgtaaaaaattatatataaattcatttatatacttctaccctatttattaaatgtcccctgcatgaaatatatattaatagctactgcatggattatctttgattgcttttctaataacagttatctggactttgcttggtcttgggtaagaggcatatttgtatgtatattttctcatttttgaaacagaaacataaactgttgcctccgatatatttaataaaactcaccagcactactgataatatttaattatgcagttataattctattcatttttagtttacattctgaatcttaggggcagtgaggcagagtgacatgatcatggaagtatttgtaccacaggggtttgaccttgactctgccacttcctgcgtgactttgaactagtcaaagttaccagttcaaagttagactttgaacgagtctaattgttagagaatggcatgaacccgggaggcggagcttgcagtgagcccagatagtgccactgcactccagcctggtcgacagagttaagacttcatctcaaaaaaaaaaaaaaaaaaaaaaaaaaaacaacaacaaaaaaggaggttacagtctgtttatgttgtctagttactagtcaacactaaccactctggctcggtgttttaacctgtctaatgggtattttttttttttttttaagtcataccatctacctgatgcggtcgttgtgagaacatttcagatagtatttattaaaatatttcctccttggtatgaagtagatgctcaataattgttaggtagcacagattaattatcctttatctaaaaattccaaatctgaaatgctccagtgagcatttcctttgttggtgctcaaaaagttccgcattttggagcgtttcagtctgtcgttccaggggtagtaacagaagctgtcatcttgctggctcttccatctggctgggttgcatgagagttaaacagtaataggagaaatgaaatttcagtaataggcagtctccttagcacaataattggtacaagagagtaagtctgacagtgccagtgaccatcagaacaaaccacagtcattgtggtaaagttgctcgaggcagtgactgaggaaagtgtgtctccatttctgtaacaatgggtagatgtctgctctaaggatttttaattgaggtaaaatgtacagaaagcatgaaaagaatttcatagatgttaagtgcataagccggtaagttttgacaaacgcatggactttgtgaccacctcctcactccagatgaacgtctccatcacccctgcaagttccctcaggcccttccaattaatctccatccctgtaggcagtcgtttttctgatttcttttcaaatagataaatattacctgtgcttgaatttcatatgaaggaaatcaaaatgttaaaagaagaacttcagacaaaggaaatttagcagagtttaattgagcgaagactaattctggaatcagaagcccccaggctagcctaagttcagagtaactcatgctgccacatcatcagataacacttatgaacagaaaaaggaaagcaccataaaagatagaagtgaggtacaggtacagaaacagctagattggttacagcttagcgtctgccttacttgaacacagtttgaacactggccgcctgtgattggccaaaactggtataagagtaggttacaggctgagcgaggtgactcacacctgtaaccccagcactttgggaggccgaggcaggcggatcatgaggtcaggagatcgaaaccatcctggctaacacggtgaaaccctgtctctactaaaaatacacaaaaaattagccggatgtggtggcgggtgcctgtagtcccagctactcaggaggccgaggcaggagaatggcgtgaacccgggaggcggagcttgcagtgagcccagatcgcgccactgcactccagcctggtcgacagagtaagacttggtctcaaaaaaaaaaaaaaaaaaaaagaggatgttacagtctgtttatgttatctagttacagttcactttgtactgagaaaacttctccccttttggtcaacttctccattttcacatcactctttcagtgtcataaagagactgaaacctcaaatcccactgggaaatagcagaacagtgggttttgtaagatagaaacaggacacagaacaccggcggcggggaggccacctgttggttacttcaggttgctttttcgaaagtgttagagagaacttccttattatgctggagtgtcccattttaggaggaaaataacctgctctgttttgagattgatctgtttccttacagtcttagtttgattaggtcgcatttagctcagtgacttcattttggtttggtctggtctgtcggggcctaggggagaggggctcagtgcagtgcaatggcctcccataattttgttggacaatacagtacagacagttttgtttttgacttttttcacccatcaaaatgtctgtgagattcctcgatggtgctgagtttaccagtttgtttctttttattgatgtacgtctctgtcgttttccatgtagggcactataaataacagtactttgaccgtttataaaaaattactcgtgtggatgtatgctttttttcctcttgggggaaatatccaggcctggaacttctggatcattgtgtaggtatttaattttatgataaattgtaaagcctttttctaaagtggttgtaccatttttacatgttcaccagtaatgtatgagttgcagttgctacacctatttgcctacatttagtgttgtttgtattattcaatttagccacttatagtttctgatgtcaaatgatgttgagcagcttcccatgtgctcgtgggctgtttgtagatcttcctttaggaagtgcatgttcaagccttttgctcattttatttatatatttccatttgtcttttctatcattgatgagtaggcattctttatagactctggatataaattcttgcaagatatgcattatcagaatattttctcttactctgtggctttcttattcaactcaacagtgtgtttgttctaaattaagctttttatttttattttattttgagatcattgtagactcaaatgcaattgttagaagtaatacacagagatcccgtgtacccatgtagactctcccaatggtaacatgttacaaaagtataatacggtattacagccaggacaccagcatcagggcagtcaagaccagaatatttctgtcagcacaagatccctgcattgccctttaattgtcacaccttcctcatttcccttgtccccatccctggccctggcaaaccctaatcccttctctatttctatacttttgtcatttcaagaatattatataaaaggaatcacactgtgtgtgaccttttgggatcacatttttgtcactcagcaaaattcactgcaaatttatggaggttactgcaggtatcaatagtttgttccattttattagtgagtagtaaaccgtggtgtggacatataacagtttgtataccattcaccttttgaaggacgtgggctgtatttagcttttggctgtcatgactaaagctgttacctaggaaggtttctgtgtgaacatatgtcttcatttctttgggataaatgcccaagagaacagttgctgggttgcatggtagttgcatgcttgcttttatcagaaaccaccagtctggtttccagagtgtctatagtactctgtgtagccaccagcaatgtgggactaatccacctttttttttttttttttttttttttacatcctcaccggcatctggcgttctcgctgttttttactgtagccattccgatagatgtgcagtgatatctcatggtggtttaatttgcgattctctaatcgttaatgatattgaacatcttttcatgtgctgatttgccatctgtagattctctttagtgaaatgtctgtttatatcttttgctcattttctatttggattgtttgtttcctgctactgatttctgcggattctttgtatattctagatgctagttctttttcagataatgtggtttgcctgtattttctcctaatctgtgtctgtcttctcatctctccgtagagtcttttgaagagcagaaggttttaatattgataaggtttaatttgtcatttttcttttgtgcattatgctttttatgtcaggtctaagagtctttgcctggccccacattacaaatattttctcccatttttttgaaatgttttatggttctacgtttaagttcctggtccattttgatttaatttgtatagaaggtgtgaagattaggtaaatgtttgattttttgccttctaggtattcaattgcctagcatcatttgtttaaaagtctgtccctcctccactgaatttttcacttttctcaaaagtcagttggctgccttgtgttgagtgtttgccagctctctattttatgtctttgatccctctatgaataccatactgtccttattactgtagctagatagtaactttgaaatcaggaagagtgattcctcatattattttgtaaaattgttttagatattctacttccttttttcatataaagcttagaataatcttgtatatatctataattaaatatgctggtatttggacaataattccattacacctgtgtgtctggttgcatagattttacatttttactatgttgagtctttaattctatggacatggtgtgtctcctcatttaattcagtctttttgatttctgttaccagcattttataattttcagcatacaggtcataatttctaaagtttatacctaagtatatcattctctttggagtgattgtaaatggtattatgtgtttcattttggtttctaaatgttcatcgtttatagaaatgtgattgattttgtgtgttgatcttgtatcatgtgaccttgttaaacacattagttctagaagggctgtgtgagtgtgagtgtttagcttctttgggatttcctacatagacagtaacatcatctacaaataataacaattttagttctttccttccagtatgtacatcttttatttatttttattcagtggcgagaccttcctatactatgttgaataggagtgatgagagcagacatccttgattcattaccaagtttacggaaaaatcgttttgtctttaactgtgttaagtgtgatattagatgtagtttttttttttttttttttttgagatggagtctcgccctgttgcctaggctggagtgcagcggcgcaatcttggcttactgcaagctcccgggttcacgccattctcctacctcagcctcccatgtagctgggactacaggcacccaccaccacgcccggttaattttttgtatttttagtagagacagggtttcaccgtgttagccaggatggtctcgatctcctgacctcatgatccggccatctcggcctcccaaagtgctggaattacaggcattagccaccgtgcctggccaatgtaggtttttaaaaattgatttttaaataagattgacagaactcctctctattcctaattcggtgaatagtttttaagatcatgaatgttgtattttgtcaaatgctttttctgcctcaattgatagctcacctaatttttttccttatcccattgatgtggtagattctttctttttttgttttttgaatgttgaaccagccttacatacctagaagatactctacttagttgcatatacgttattttaatacattactggatttcatttgctaatattttgttgaagatttttgggtctaagtttatgagagatactggtctatagtttacttttttgtatttgtcaagattttatatcaaggtagtaatagtcttcaagaaatgaattgggagatgtttctttctctactgttttctggacaaaattatgtacattggtgttgattcttctttaaatgtttggtagaattctccagtgaaatcaactgggtctggagaatttttattgagaagcttttaaattataaattcaatttctttaattgcttatgggactatttggactattaatatttcattttggctgaattttagtagtttgtagttttctaggaatgggtttctatcttctaagctgttaaatttgtgagcttaaagttgttcatagtattctttttttaatgacttcaatatctgcagtgataccattgttggtgttgatgatttgtgtcttctctctttttatttattttagtcttgctagaggtttatcagtttttttctcaaagatccagctttcttatcaatttatttatttatttaaattttattttattattatactttaagttttagggtacatgtgcacaacgtgcaggtttgttacatatgtatacatgtgccatgttggtgtgctgcacccattaactcgtcatttagcattaggtatatctcctaatgctatccctccccccttcccccaccccacaacagtccccagtgtgtgatgttccccttcctgtgtccatgtgttatcattgttcaattcccacctatgaatgagaacatggggtgtttggttttttgtccttgtgatattttgctgagaatgatggtttccagtttcatccatgtctctacaaaggacatgaactcatccttttttatggctgcatagtattccatggagtatatgtgccacattttcttaatccagtctatcgttgttggacatttaggttggttccaagtctttgctgttgtgaatagtgctacaataaacatacgtgtgcatgtgtctttatagcacaatgatttataatcctttgggtatatacccagtaatgggatggctgggtcaaatggtatttctagttctagatccctgaggaatcgccacactgacttccacaatggttgaactagtttacagtcccaccaacagtgtaaaagtgttcctatttctccacatcctctccagcacctgttgtttcctgactttttaatgattgctattctaactggtgtgagatggtatctcatagtggttttgatttgcatttatctgatggccagtgatgaggagcattttttcatgtcttttggctgcataaatgtcttcttttgagacgtgtctgttcatatgcttcgcccactttttgatggggttgtttgtttttttcttgtaaatttgtttgagttcattgtagattctggatattagccctttgttagatgagtaggttgcaaaaattttctcccattgtgtaggttccctgttcactctgatgttagtttcttttgctgtgcagaagctctttagtttaattagatcccatttgtcaattttggcttttgttgccattgcttttggtgttttagacatgaagtccttgcctgtgcctatgtcctcaatggtattgcctaggttttcttctagggtttttatagttttaggtctaacatttaagtctttaatccatcttgaattaatttttgtataaggtgtaaggaagggaatccagtttcagctttctacatatggctagccagttttcccagcaccatttattaaatagggaatcctttccccattgcttgtttttctcaggtttgtcaaagatcagatagttgtagatatacatgcagcattatttctgagggctctgttctgttccattgatctatatctctgttttggtaccagtgccatgctgttttggttactgtagccttgtagtatagtttgaagtcaggtagcgtgatgcctccagctttgttcttttggcttaggattgacttggcgatgcgggctcttttttggttccagatgaactttaaagtagttttttccaattctgtgaagaaagtcattggtagcttgatggggatggcattgaatctgtaaattaccttgggcagtatggccattttcacgatattgattcttcctacccatgagcatggaatgttcttccatttgtttgtatcctcttttatttccttgagcagtggtttgtagttctccttgaagaggtccttcatatcccttgtaaggtggattcctaggtattttattctctttgaaggaattgtgaatgggagttcactcatgatttggctctctgtttgtctgttattggtgtataagaatgcttgtgatttttgtacattgattttgtatcctgagactttgctgaagttgcttatcagcttgaggagattttgggctgagacgatggggttttctagatatacaatcatgtcgtctgcaaacagggacaatttgacttccttttttcataattgaataccctttgtttccttctcctgcctgattgccctggccagaacttccaacactatgttgaataggagtgctgagagagggcatccctgtcttgtgcccgtttttaaagggaatgcttctagtttttgcgcattcagtatgatattggctgtgggtttgccatagatagctcttattattttgagatacgtcccatcaatacctaatttattgagagttttaacatgaatggttgttgaattttgtcaaaggccttttctgcatctattgagataatcatgtggtttttgtctttggttctgtttatatgctggattacctttattgatttgcgtatgttgaaccagccttgcatcccagggatgaagcccacttgatcatggtggataagctttttgatgtgctgctggatttcggtttgccagtattttattgaggatttttgcatcgatgttcatcaaggctattggtctaaaattctcttttttggttgtgtctctgccaggctttggtatcaggatgatgttggcctcataaaatgagttagagaggattccttctttttctattgattggaatagtttcagaaggattggtaccagctcctctttgtacctctggtagaattcggctgtgaatccatctggtccttgtattacttttctctgtccctttttactgattctgctcttacctttattattttcttccttaaatttattttcactttccttcttttgaggtaggaaggtgggttattgacttcaggctttccctctttctaatgtaagcattttagtgctatacattttcctctcaacacttctttagctgcatctcacacatattttgatatgctgtattttcattgttttgtatattttcattgttttatttattttttatttaattccagactttttctttttcttttcttttctttttttttttttttttgagacagagttttgctcttgttgcccaggctggagtgcaatggtgtgatcttggctcactgcaacctctacctcctgggttcaagtgattctgctgcctcagcctccagagtagctgggattacaggcatgtgtcactacggcaggctaattttgtatttttaggtgagacagggtttctccatgttggtcaggctggtcttgaactcccaacttctggtgatctgcccacctcggcctcccaaagtgctaggattacaggcatgagccacggtgtccagccccaaacattttttctctgacttgtttatttttaaaaattctgtcattcagtttccaggtctttggagatattcctgttgtcttttggtttttgttttctagttttattctgttaatactatggccagaggatacactctgtataaatttagttcttttaattttttttaggtttgtttactagtctaggatgttttctatcttgattaatgctctatagcacttgaggaaaaaaaaaacaagaaacacacacacacacacacactaggtgtgatgtctactgtataatgtaattgttttccaccttgtggttttggcatttgaaagaacagttaaataatccaaagggatatattgtggaattttaggctgtcaggaagtttttactgtataattctatctgtaaggagaaagcatacgtagctcagtgcttattagattgttttatggtttgaagaaataatgtttcacttaaggaaaaatattctcaaggaaaaaatgcccacagtcgtcagtgaactgctgagtctcatctacttcattgctcaggcatgtaagaccttcctgtttactaataatgttgacttttccttcttattgggaaggaagctaaagaacagcttgatggtttaaaatgatgcacctaaattattgattccattatatatttaggcagtacatttttctctcttgaataatagaaatgtcacctactatttaattttcctttttttttccagagtaattttcactatgtctgattacataattagatttgggataccaactgggtatacttggtaagaaaatgagaattaaaatgtttcagagtaaaattatttcagagcttttgcaaatctttattttagataaggtgatttctatttttaggtttgtttttgaaatagtctaggacatttaaattttaacttctgatcaaattaagttgttttggttcatttaatttgtatgtttcatgtctttgacaaaagttttttttttaattgatgattttttaagataaaatttatgatttggaatgatccaattatctaattccagatgttacttttgaaagatattaatttctaaggtgttaattttgcatttttgtgaaaataacatacacttcatgaatctaactgctaatttaacagctctgtgtggatgtctagtgggtatttcaaacatcctaagttcaacactgagctcttgttcttttcctctgagccagctccttccatcatgagttcccatttcgggaaatgacaactacatctttctggtttttctggccagaaattttggtatcatcattgattcttctttttctcttatgcttcacccttaggccccaggtctgatcaaccattgccacctttactgcaaccagtttaccaaatgaccgtcctttctcatctggattaacaagatggcctcctgagtggtctcccggcttcagcacttgtagcccagttgcatcagggttgagtgcggagtgaggtagtgaagtcagaacttatcaaacttttgctaaaatttccccattggcttccattgtcccttataagtccagggtcccataagacttcttcctcttactttttaccctcatctgtcatcccccgcactcactgcacttcatccaccctggtgtcactgctggtcttagaacacagtggactgactcccacatcagcgactttgtacttgcttttcctgctgtcaggaaacctgagtgcatgactctcttcatcagctgcttccctttcttactcagataccccgttctcaacgaggcctttttaaaacaatcttccttgttgaaaattgccacttcttccccagatttcttttttcctcttcttccttttattttttctatagcattatcattacattatataaaggtgtttctgttattattctgtatgtgtcttcctgaaaaaaaaaatctgtgaaatcataaaccaaaataacacaacttatgaaaaaagttatgtacaacactgaaaaaagtgttatgtacaaaccttcaaaaatctatggaattttgcaatcaggacactaataaagaaataatactactagtaactttcttcattgatttgctgttttgataaaaagagaaagggcttccaagatgcaccttcaacttctctcaatagtgtaatgtcatagaaagtgaagtggtttgtgaagcccctaaactggccactagtcactacctgcactacacaaaggaaggccctttttttttttagtttttaaaattgtaatttgttgtgctgctgctgctgatcatttccttttattttaaggctcacctttgggttcagtgataaagcttgttcataagcaccttagatccttaatattccagggggaaatcatacataaatcactacaacttctgtgttatacaaatatcagttcctatctctcaaccacatatgaagtaatttgaataaaagaaatatgtgcgttagtaaaaccgactatactatatattttctttgtttcctgtttatctccctaaactagaagataagctccatgaaggtgtgatcctattctgtgttcctttttcaaaattctcatttgtgttcccatttcatagacgtttactaggtatttaagaaatatttgttgaatgacagagcaaataatcaaaccaatatctagacttctctagaattctgaagtaattgaaagtatgaatgctttcttttctttaaattgaacaacttctttggcttaatagttagtgacatttaagacggtggcctgatttatgtgtgttatttagaaagccaaaagtaaatgtgttgtggatgaagttcaagatccagcattctgtaggaagatgcaatttcattctgtgacaacatgttttaataggaactaacacgtagattgtgcttttctagcaggtgctggcgtaagcattctgcacacattgggtaatttaatccttgagacaagtctagagcagcagttcccaaagtgtggttcaagaacctgtggcagaccctgagcccctttgcagggggcggccacaaggccaaaatcatttcatcagaatagacctttgtactttgtccccttgttgagcttttggcaacgatttaaaagcagtcgtgagaaaacttctggcacctgagcgcgtatcccgaggcagtggtgccaaactacaccagctggtgtgttactcatccgtgccacacacctatgagtaaaaaccaaaatctagctctctcaaaaatagccttaaagtagtaaaaattattaattctattaagctttgactcaaataaaattattaaaatattctgtgtcgaaatgtgaattacatataaactcttctgctgtacgccaaaatgtgccggttgtctcaaggcaaaggatttgggaggttgtccgagctgggagttgaactggctgcttttttgcatggcaccccatttttacttgaagtagtgactgacagaaaaactatggtaatttagacttgggtattttgcaggattttcttgaaaatgaagaaaataagcttgttgcatcaatgaaaacaactgacagtatttgtggctaaagataaaaattgagctcataagtaaaaattagcattttggaaaccttgaatatgcccaccatgagcttgacactttcgcattatttaaggaggtgtctgatgagataggtagctgtgttaatttgtgatattttttacattgtataatgaaacgtgtcaacgtttggaaggtctgcatcactcagcgaaccaggaaagacatgtgtatggataagatccattccaagtacaggacagtctgaaagatgttaatgtaacaaagcaccaaagtgtcatttatgcggtttcagagtccgcgttgcaactaacctttatgaaactgacacttgtttagttttactaaagtattaacaaaaatattcacagctgtttgaaaaggcaattaaaatactcccctcctttccagccatgtatctgggaggctgtatgttattaatatccttcaactgaaacaacatattacaagagactaaatgcagaagcaggtgtgagaatctagttgtcctttattaagctagacactggaaaaatttgaaaaagggttaaacagtgccactcttaagaatttttagttttcttttggataatatagttatttttcataaatgtcttttgtattaataatgtaatgactttgattttttaaggaattaataactttttaaagttcacaggtttactctctaatatgataaatacagaaagaaataagtcacataaacaagaatttaggtgtccttaatttttttgtatgttgcaaagggatcctgagaccaaaaactttgagaactgctgctcttgaagaagttggtgctattgctttgttgattgagaaacccagacataggggttaagtagattgtccaagatcacagagctagtcaggggagagctgggatttttctttttctttttctttttttgagacagagtctcactctgttgcccaggctggagcgcagtggtgtgatctctgctcactgcaatctctgcttcccggtttcaaacgattctcctgcctcagcctcccaagtagctgggattacaggcacgtgccaccatacccggctaattttttgtattttcagtagagatggggtttcactgtgtttgccaggatggtctcgatttcctgatcttatgatctgtccacctcagcctcccaaagtgctgggattataggcgtaagctacggtgcccagcctccccaccccccgccacccaagacagagtctcactcccttacccaggctagagtgcagtggcacgatcttggctcactgcaacctttgcctcctgggttcaagcgattctcctgcctcagactcacaggtagctgggaccacacgcacacaccatcatgcccagctaatttttgtgtttttagtagagatggggtcttgccgtgttggccagactggtctcaaactcctgacctcaggtgatccgcccacctcagcctcccaaagtgctgggatcataggcaggagccatcatacctggcatagagctgggatttgaacccagggctccaaagtacttgctctaaactcaaatcacatattattacttcttgagaaacctccatggtttgtaactttgctaaaatcaataagctttggttggacttagatgtcctttcaagttattttctcatgtaatttcttgatataaaattaaaccttcaccatgtggatatctgttacatctcagtttttatggcagtacatatttgccgtaaactcaccagcaaacagataagcaggagaaggtaaatcatatttgagattcttttcttggacctttcagttttttatttaatcagggttgatttcttaagattattcgaaagaatctttgaaagaaatattgtgccatattcaagaataatgttggttatttctgataaccttactcttattttggttggtcatactttttcactacaaaccatagaaatgacagttcagtatacttctactttgaagtaaaatattggagagctggaagcttatttcagtttggagaaacgggaattgtatttatcccactgtgtcttattaatttatatactgaaatagattagcacagtgcaagataaaactagtacataaatatagccatatatgtttctaccatcagcttcaattgtggattaatctcactggaagcttgaatggtttcttaggggaaaatattggaagggtaggtttacccccagagttcccttaaatatggtgttaatttgcattgatttcagagaaaacagagaatcagtttgacttccccactggctgactgcataggcaaactattcacagtgctgtttaatggaaatctcagggaccctcctgctttctctgttttcacatggactgactcaaatatggagaggacaccagggacaaattacttggagaaaatcccacacttgttagtcagatttttgagtacaaaatgatgactttgtggtgagatcaaggaatacgcagcacaatctttgacttgtgttagtttttttgtttgaaataagagatatattctttcaattgtagctgcctttcatcctgaaatgtctgacatttattttacaaggcagtagtagagagagataaggtaaaatacagagaagttgggtgggtaatttatttatttattttttagattgacagaagatgatggtacatctaagtatatttgaaagtctaccactgggaagtatttagaaatatttatgataagctaaagaaacaaagcctgggaatttgctgtgataatagagccaactcttttcactggagggagaattacatagtttgggaattagtatgtaccattcgtttatgtcctttttctcctttctcctcctgctcttcctcctcttgcaccgccgcctctagttcacatttaataaccaaacgacttacttgggtggtgacaaaaagggcagcctgaactgccctgtcctcactgccttttctcagcttagcagatagaggactttgtcctaaaacaatcataggtctctttttcgtgtaatgccttcttttcctctgggtagatacccaggagtgggattgctagatgaaagggtagttctactttcagttctttagggaatcttcacactgttttccatagtggtcgtgctagtttacattcctagcagcagtgtaaaagtgttcccttttcaccacgtccctgccaacatctattattttttgatttttgaaaaattatggctattgatcaggaaaatgcaaatcgaaaccacaatgctatgcctccttactccggcaaaaatggccataatgaaaaaatcaaaaaataatagatgattgtggtgatggggtgaaaagggaacacttttacactggtggtgagaatgtaaattagtacgaccatggaatactattcagctctgaaaaggagtgaaataatggcattcacagctacctggctggaactggagaccattattctaagtgaagtaactggggaatggaaaaccaaacattgtatcttctcactcctaagtgggagctaagctgtgaggatgcctaagaatgatacaatggactttggggacttgtgggaaagggtgggacgggggtgagggatacgactacacattgggtacagtgtacactgctcaggtgatgagtgtaccaaaatctcacaaatcaccactaaagaacttactcgtgtaaccaaacaccacctattccccaaacacctatggaaataaaaaaattaaaaatcctatcataggatcctcttacagcatcataatgtggacctgtctatatttgcatatttaactagagtggcacatatctagttatctatttaaacctcaccccagaagtacatttgaaaatcataattgttgtccttaaaaagattgatattactattatgaagaaagcacattgcactgtgagattaaattcctggcttcaataggtatacataatgaactgccagcagctgaaatttgaatgactacacttaccagaaaaggatcttctacccacatttctcagaatagttgttcacaaatgatacattctgccctgtgcttttgtttctccctggaatttgaaaaataaaacttttcgctcatggtaaattcataagcttggggcatgaaaatgtttgaatttgatataaaagaagttttgaaaggaagattagtggtttaaactgaaagattagtcgccctgggaaattcagctgtggcaaaagcggagttcagtaataacctgccctggctgattactccattcacactggcattctggtcctcccggctggactcgcacctgattgacggtgctgattatgatggcttaatacagctcatcgtcacttcaccgggacacgtggactttgtgggcttcacagactaccccccaccccccttgtttgtggtacagttgattcttctgctaagtggaggttgattatttctttattcattatctctttaaaatgcaggagaaaagggcaaattatcaaataggtgatgattatcctagtggaagctctcttgggcagagtcaaaagaagaacttgcagttcaacttgcttgatacctcatagttgattcctattcattctgccgttgaagggtttcagatgatacgacttaattttagctgttgtggaacagcaatgaaaatccatcgcaagaccccctttcttgatgttagggaagccgggggacgcaggatgaggtagtaggctccagctgctgcccatgtgaatgatttttcctctgcagatagatgggtcatggtccctttctagatgagcagaagattattctcacattggagaggtaacattaaatacatttacattggatctgaaaaccttaaatgtttacttagggaagtgtcatcttcacataaaattatgatgttgtgtaagccttcctttttctccacaacctctccagcacctcttattttttggcttttgagttacaggcattctaactggtagcttattttggttttgatttgcatttctctaatggtgggagtgtaaattagttcagccattgtggaagacagtgtggtgattcctcaaagacctaaagacagaaataccgtttgacccagcaattacatcactgggtatacacccagaggaatataaatcgttctattatagagacacaaagacacatatgttcccaatagcaatgacatggaatcaacccaaatacccatcaatgatagactggataaagaaaatgtggtacatatacaccatggaatactacgcagccataaaaactatgcagatcatgtcctttgcagggagatggatggagctggaggccatcattagcaaactaacacaggaacagaaaaccaaataccacatgttctcctcctataagtgggaggtaaatgatgagaacacatggacacagagaggggaacaacacacattgagtcctgttggagcgtggaggatgagagcggggagaggatcaggaagagtaacaatggatactaggcttaatacctgggtgatgaaataatctgtacaacaaacccccatagcacaagtttacctatgtaacaaacctgcacatcctgctgaacctgaacttaaaagttaaaaattatgatgttgtcttgagacaatgttaagtctattcctgtcctttgggcagaccttaaacctatattatccacacagatgagactctctctttcataaatgatttatgttctattttaagaatagaacactttctatatgaaaatggaaatttcacttttccttagtaatttattctagggtcttctaatgttcgttgttagaatacagaagtattcctaacgtctgctcattttcctgaggaagggaatgtctattattatttgaaatacacacacacccttcaaagattaatatgtgggccattggcttttccccaggtcagagttttataactttaccttagaggcaactcaatcattttctttatgaatcatttcaggatgttctctttcccatttaaagtatgtaaagatcaaatgcttttgcagggcatctgtgcagacttgaatactgatccttctttctccctttctgtccccaaagttttgtgttttgttaccttaatgccctcttttaacttgtttacctactgtatgtatttcaatggtaaatagtgctgggctcagagaagtgctattccccaccttggctaatctatgtcaaaatacgtgtcgttatgattttaatttgaacgcttaaaattccagggtgttgacatattttcccttcccttctccttataatgaatgttagtgtctgtgctaaccataattttacggccatttggatctcgagatatttgcttgccagctatatgaaaccattctttaaaatgagctttttttttcctaccagctcacagtatccagccttataatttgtacatggtataggcatgtttgtttaactataaagtccatgaaaaattgagttgtagtatcattttaattcaaatccgttgtatactatattaaaatgatgatgctctatcaatagcaaaaccaaattcagatttttgagtttctatctcgaagcttttccctttcgaaaagatgtatgttttctatgactcattcgtgtaggacactggaaccatatgaagtggcatttctttttctgttgttaaacagagtgcaaatggccagacattaataaagcctgtagctcagtaaatcccacaggatcaaagctacctccattgcagttcagctttattagactgtttgggtaataagaggagatgatttttgctgaagtacataggaaaaaggaaattggacacatggctacattcaaatttaagaatgcagttgatatacagcttaacgcatgtcagttgcagcagaagcaggcagaactcttggaacaggacaaggctcgacaactcctgactttgagttacatgtgctgtcacagcatctaacactttactgcttacattcctgcatcagacctagattataagcgcttaagggacagcgactgtgtcttacactttgtattctcaatgctgattacagaggctggtacatagcatcagtgcatgtttattgaacagaaagttgtacaagtcagagacataagaatccttcttgacatctccctctccctcacatccataaccaatctatcactgaatctttttcccacctaactattgctttaaagcggatcactgcagtggcctctggactggtgtcctcccactattccacgccctctttttttccttctcacattacagccagaatgttcttttaacaacacaatcacacaacctcttcaaaggctttttgctgtctttttttttttttctgagacagggtcttggtctgtcacccacactgccaggctggagtgcagtggcacaatcacggctcactgcagccttgacttccttgggtcaagtaatccctccacctcagcttccttagtagctgggactgcaggtgtatatcaccacactggctaattttttaaaaaactttttgtggagatggggtctcactgtgttgtccaagctggtcttgcactcgagctcaagcaatccttccgcctcagcctcccaaagtgttgggattataggcataagccaccacaactggctgtccttttgtagtaagagctaatcatcatcatcatcatcattatcatattgacagtactttttacaaggttataaatagggtgatcacacacgttgttaatactcggacacttgaatgtgaggtgggcagcatggacagtcacgcaacgatgaggtgggaaccagaacacgtgtggccctgcctgcaaggccctgcacaacctggccctgctcatcccacttccagtcactctctttgcacctgcagaaagtcttgctgttcactctttcgtactgcccaagggtactcgccatgtttgctcccaccagagggcctgcttaacggtttggagtgctgccaacacttttgttctcagctcctgcatttcatctcatcgactaggttaaatctcctactgtaagttcttgccgtactcatagatgcaatttaatatttatttatttgaatgaataaatgaataaatacttgtgagaggttggtaatattgtattactaatataccaattatgatggaatatagtgatcaacaaaatgacaaaataacctatgtatttatatttaaattctatatattcagtttatacactatagtttaatgtgcaactagtttcagtgttaacatttctaatgtgctacttgatgtttattaaatgtacagtagtttataagaacagcttagtaatgtcacaaataaattaccaaaaatttaaagttgagtatgacttcttgaaaagaaattttccgtattaaggaaatatgtgacatttggagtcaaaatatatagaattggtagattctggagctagattatctggatttaaatcatgacttcactgcctactgactgggtagcattgagcaagttatttaacttctccatgcttctgtttattcattcttaaaatgggtataatgatgacatctatgttatagggcttttgtgagaaataggttaatatatatataaggcatttagaatggtttccagcacaaagtaaataataaatactagctattgctgatattagtgttattatatttattcattcaacagatatttattagctatccccttagttcctggcattgttctaggtgctaggaattcagaagtgatcaagactaatgtactgtagagtaacctacaaacactttaatttcagtatctgataactattgtaaatggaataaacataatgacttgttagagcatattgtgcaggaggagctttagttaacctgaaggatgagcaaagatgagcatgcacagagcatcctaggtagaggaaagaccaagtgggaaggccccacagtaggtgtctcactccgttttctgctgctgtaacagactgggtgattcaaaaatgatggaagtatatttgactcttggttctagaggctggacagttcaacaacatggcagttcatctggggaggccctttgtgctatatcatcctgtcatggaagtcagaaggtcaagggagtgcatgagacagaggatgggggcccaacttaccctttttattaggacccctctcccttgataactaactccctcccacagtatcagcattaatccattcctgaaggtagagcctgcatgacctaatcatatcctcaaggtcctgcctcttattactgttagaatggccatcacatttcatcatgagttttggaggggacattcagaccgtaactctaggaaagagcttggcttgggtttaaatgtgcaagaagtgaagtgtgcctggagtgctcggtgtgagcagagaggggaggaggcctgaatgaaagttagaaagctgattatgcaggtggatcttggggacttttgtagaaaaatgacgagtcatataatcctgtttattttgctgataaagaaacaaaaacctgtaagtcctgatgaggatcaggtagctaattagtgatgctacagctagaagccaagtgtgctgcatccatattaaaaaatgttattgaaacagatctacaaaacattgacaaatcatatctagtattctctccattttcacaaagtaaatgtacctttgtaaccacatcaggaaataaattttgacctgcttttcataagccatcccattaccttcacccccgtcgctatcccatccctcagaggtaacccttatccttaacctctgacaccatagattagttttatctggctgtgaacttttatgaacttttgaatagtagcacatgctataagcttttttgaaaattctgtctggcttctttcactcggcttgatgtgtgtgggatttacctgtgttgctatgtgtagcaattgttgctgcattctcgctgcagtgcgctgttccattatgtgaatataccatgagtttcctgtgttgtatcccattgaaagtcaccaggagagaccatttccacgtgtgtatgaaaggaaagctaggttgcgattcatgtcgtttatgtatgtatgtcaatcttgcttatcttacttttttaaaaccaattgaaggttatagaggaaacttctcttttatagcctgcatacacttgactgttttctcgcaaatagattgcctagttaaaaccaaaagcttgtatgtacagggattgtccgatatgtcccttcaataagctattaaccataagtggaaataacttggatgaacctgtcagatgctttcaaatgcgggtatcattgagctttcagctttttgaaatattatctggggtattgcatgtttccagggtttggtaaaggattatttacttcttaattgggccaaacagccatcactttcattttaatattacgtttgtttaaataatagatttattaaattagatgagtgccactttcatgcgtacttcagttttgttttgttttgttttttaatatttcagatgatgttgctccatattttaaaacggagccaggcctaccacagatccacctggaagggaaccgccttgttctcacctgccttgccgaagggagctggcctttggagttcaagtggatgcgcgatgacagtgagctcaccacctacagcagcgaatataagtaattgatcgcttgaaaaaataagatcccatttcagttgatgtgtttggaatacttgccttactggtcataatagcacaatgagtgaaaatattggattgaatttctaatgcattcaagattaaaggaatagatttgaatatgtaattagaatgtgatttactattctgatataggttgtacttacacctaggaagtctatcattatatttgtaaaagtaagcccattagtgaaattatcagtcaacaaaaacctatggttacagagcaatgccaataacagctttggtatgatacatttactttccaagggcaacagccctacccacaagtattgctcctgtctaggcacaaatgtttaaacagatctttagtatggtagcttctggagctctgagtagtcagcaaaagtctttcctagctgttttcaagtggagatagggatggatggaatcatggagaatgggcatgcatacagcctgtatattcagcagcaataaaacagtatatattgaagtcctgccatgtgcccagcactgtgccagtcaccagggatctgatgcactggggtggacatgatgtggggacagagggcctgaacctgtggcagagcacaagatcagggtaagactgaggtgtagattcacctggaggcagtagcacagcctttggagcctcagggtcttaccacgcttcagagctttccaggggtatacttttgaggatgataatattacatgctgcagttctgtgcaggatggagaactagcatgccagaaaagtccaggaggcctcaccatcagcaaatcagcaaaatcatcgctgccatgcttttctttagatgaaataagaaagagtgggctgtatagaggcattttaagtggaataacaagcttctcaaatggggaatagcccacccactcactctctttacctctgaggttgtgatacggtggtccgtggaaccacactcagcctgcccagaatttatgtgtgtgtcagttgtctgtgtgtttgtattttaaaaatcaattaaaaaaaatatgagaatgcttacagcattttttttttttttaatttgagacggagtttcactcttgttgcccaggctggagtgcagtggcgcgatcttggctcactgcaacctccaccttctgggttcaaatgattctcctgcctcagcctcccaagtagctggttctacaggcgtgagccaccacacctggctaatttttgtatttttagtagagatggggtttcaccatgttgaccaggcttgtctcaaactcctgacctcaggtgatctgcctgccttggcctgccagattgctgggattacaggtgtgagccacagcatatttttttattagctgccaacatttgacagttctaagattttctgtaaaaaccttgcttcccagcctctgcagaccagtcagaaggcctggctgcctggtctgcagccccaatcaggagcaggcggctgagcagagctgcccccatcaaaggcatggacactccctggttctcctcggtgctctctggcagccccgtcccttgtagcacctcacttgctctccccattcccattacccacccacactttagacaagtgagtgtgtgactgcttacattattgggcctaccctgttggaggatctacactcgaggaaaagtttatcatagtagatcatagcatgttgaaatcaaacagtcctgaatcctaggactggcagaattcagctccaccacacctgagcaatggtgttataactttaggcaggtgacccatgagccctcccctcccgtaagtgaaaagagagtgacgtaagcgtttgcaaaatgggaaagatccctcctcatttgcagtgttgtgagcattgaaggctctagtgatcgtaggcagcattatacattattaccatgtgacattgtaaggctcagtttgttagaaggggtgtaagaaagcagaaacagaaaaagtgaacttagagttgagaaccatgtttgagtagtgactgataacagaagactggagttcagggacttgctcttcaacttaccggtgtgactttggacaagttatctaatgttgatctttttccattggaaaaatgagtacagtaaggcccacatcaccctcatttttatgagagttctcttaaaaattaaattacatagtgctttgtatgccccagaaagaaaggaatggagtttcaaagaacccagattgttcttcctaataagaagtaggcatgatgtggacagtgtgtgacagtggcctggtggccaggctacacgccttggatggcgggaaaggaattgtttcctagatcttcagtttccacatggatgttttctgaaactgaattccccaagaacaggcctttgtgtaggcaccaagccatttctcttttccgaccacctgtaatagtggtttctcctccatcccaggagaaagcgcacctgtaccttatctgagtcttcctgtggaactctctctggggggtgcaagagtaagacagagtaatatcaaagttcccactattaaagaattcttttgatttttaaatggataatatgggtctcaaactattatttgcaaatcgttgaatatacagagggtccccaacttacgatggttcaacttaacaattttttgactttacgcagttgagaaacccttctgttttttactttatagtatttaataagtcacatgagatattcaacagtttattataaagcaggctttgtgttggatgattttgcccatttgtaggctgatattagtgttcggagcatgcttaatataggctaggctaaaccgtggtgtctatgagggtaggtatgttaaatgcatttttgacctagggtattttcaacatacgctaagtttattgggacataacaccttcataaggctagcagcatttcaatttaaaacaattttgtaggcccggcgcagtggctcacacctgtaatctcagcactttgggagggtgaggcaggcggatcatttgaggtcaggagttcgacaccaccagcctggcaaacatggtgaaaccccatctctactaaaaatacaaaaattagccaggcatggtggcgcatgcctgtaatcccagctacttgggaggctgaggcaggagaatcgcttgagcccaggaggcagaggttgcagtgagccaggatcgcaccactgcactccagcctgggctacagagtgagactccatctccaaaaacaaaattttaaaaaaatggtgtaacggctttattttaaatgccaaagtgtacaaaaaactgttatatatgcaacctttcagaattataagacaacttgcagtcaacttaaaactgcaggaagaggtggaacactctttgtattcttaagagcccttgcatatgtatttgttcattggaaacacaagaagacaaaacgttgttggttgtattgaagcaagattgagggagtgactcgttatatgtggactattaaaataagctatgtgcttcactactatgacatgggaaacgtaaggaggaatgggtgattctgaagcaagaattgtttggggtatttgtgataaattatattatgttccacgagggcctcagacacttagatgggttatcaggaatctatcatagcttgcttttttttttccccatgatataaaacctgtctaaaaatctcatactattttttcaaattactctttcatctacttccttccagtaagcatgttcatttatcatatgttagccttcatgagacctttgtaagtttcaaatgaaaaaaacatggatactttatgaaaaaggtagttgtttcccaccttaacaggacccttatttttccccactttggtgtcagttatgaaaatgctaaccctgtaaagagcaaatactacacatttactttttctagctttgacttaaaataacattttctttgctgtgtgcgttacacactgcacagtgaatttcaagtgttgtatttcttttttttttttttttttttgatgtggaatctcactctgttgcccaggctgatgtgcagtggagcgatctcggctcactgcaaccttcgtctcctggtctcaagcgattgtcagcctcctgcgtagctgggactacaggcatgtgtcaccacgcctggctaatttttttattattagtagagaaggggtttcaccatgatggccaggctggtctcacactcctgacctcaagtgatctgcctgtctcagcctcccaaagtgctgggattacaggtgtgagccgctgcacccggcctcaaatgttacatttcatattgatgctcatgtctacattttggtggcacaggtgactacattagcaagttgacggtaattcagcaattaaactaagtttgcatagatatcttaggtggatttgtattctttccagaaagcatttagtctaaattattttctactttggaatgaaaaaatcttttctaattatattcaacatatacatacacctaagccgagaatttcttaatgctaggcacaatatttattattgtaacagaaggaataattgtatactctaaactcctaaaaattttatagttttcttatgtaacctgcctctgtggttcaatttctatgacaatataaaaatagaaatttgatggatgtttattcttgctttattccagggaaaataagaatggttaagggaaaggttatttttttcttttgttttataaaaaggcaaacatttcacagtatcaataaaaattatgaaatacctgggaataagttttataagaaatgagtagaacccacgtggaaagtgcgtaatgagatataaaagatgatacttatgtaggaaacccacttgctataaaaattacagttcctttgaagccatcatagaattttagcctaacatcagtagaacttttcagaaagctaatatcaatagctgattttattttgctgagatagggtctcactctgttgcccaggctggagtgcaagtggcctgatcatggcttacttcagattcagcctcctgggctcaagcagtcctcctgcctcagcctctcaagtagctgggaccatgggacccaccagcacacctggctaagttttctattttttgtgcagatggggttgcactgtgttgcctaggctggtctcaaactcctggcctcaagtgatctgccagccttgacctcccaaagtactgggattacaggtgtaagccaccacacctggcctggatattttaataaaaaatgccaatgggattttctggggaagtaactgatgaagtttttctaaagctcatctagaaatgtaaacagaagaataccaacaaattttcacaacattaagtgaataatggggaggaacttttttttctaaaacccaaggcatattagaatgccataataagtaacatgttaatagtataaaattaaacaatatgccagaggagcattttgaaccagaccattatatttataaaaaatatatgatcaaggccaggcatggtggctcacacctgtaatcccagcactttgggaggccgagggaggcgcatcacctgaggtcaggagtttgagaccagcctgaccaacatggagaaaccccatctctactaaaaatacaaaattagctggttgtcgtggtgcatgcctgtaatcccagctactcgggaggcaggagaatcccttgaacccgggaggcggaggttgcagtaagccaagatcatgccattgcactccagcctgggcaacaagagcaaaactctgtctcaaaaataaaaattaaattatatatatattcaaatgagttctcaaaccaatgctaaaaacaactttttgcaaacattcaaaatagatcctcattaaacatcaaaataaattttagatacaatgaacaattaaatataaaaaaatggaaacataaacaaagggaatatttgaatgatctcagattataccaggagaaagtacaaaagcattgagaaacttcatcagaaaccgatcacagataaatttacaaatatttacaagttttgtataaaagatacaaaatttttaattgcccatttgcttaatcttataagttaaaaggtaagcaacaaactgggacaatatttgcaacaaatcagacagttctgtctctaataacttgggatctcctgatgacagtggtggagacaaagcttggctctccttctttgtttgtgaatgtcatcccaggaagcaggtgtaaaggcaggggaatgaagcagggaggaaggaagcaccagtgcagggatcccttatcaagttggcagtcactctaagtggctggagctcaatcttgtttgcaacgtctatggagtcttatgaaatgcatctcagaagtgcccactctaatgggtgaaagaggaaattatttatcagctcctgtacttggctgataaatatgggtcccatggttattagccttcatttctaattagctcaagcattggtaagcagctaaacctgctggctgtggtgccagagaatccccaggacaggaagcaagaaataggaggcatgggttgaggcaaagtgatgccagctgcgccaccataaagctactcagggctgcctggaagtgttgaccacagcagcagctcaagtaaaaggtagagccagaaggatttttctttctttcttttctttctttttttttttttttttgagggagagggtctcactctgtcacccaggctggactgtagtagtgtaatcatagctcattgcagcctggaactcctagactgaagtgatccttctgcaccagcctccctagtagctgggatcacaaatgggtgccaccacaactagctatttttttttttttagacacagggtcttgctatgttgcccagcctagtcttgaactcctggtctcaagcagtcctcctgccttggtctcccaaagtgctgaggttacaggtgtgagccaccacttccagaccgaaaggatttttaaaatagagagtaagaggacaaaattgagtctattccttgaacccctcagtgtaacttgtacctgctgttaagtctaattcatgaaagagtcccttctaagaagatagtcagctatagtttctaacaaggactttattcaagagagttagtagaacaagctatttttcttactggaccaagtctcaaggctataattggtatttatgttctcctgcccattttaggtatgcataactctcagcctgctcttcagctagtcgaatttgcttggtgctgggtggcccaggccctcatctcaccttttagttgccttgcctttgtagggccatggattctctaattacaactggtcttgcgagtactaagagataccccattgacttctctcctcctcacctctgctgtgtggcaccagccctagtgtcttagagtgattagagtcatttacctccatcagtgtagtaacgcctttctttttcaccagcccactggcatgaagttcacaaagtgagtaggatgaattagagtcaaattctctgggtccctttttcttctataggaaatctcccccactgagaactcagatctgtaatccaaaagagcctaaagttgggaaaaaaacaaatagatggccagaataggggccaatcatatcttgacctcaggttcaacaatttttttttttttattttgagacggggtcttgctttgttgcccacgctggagtacagtggcacagtcatagttcattgcagcctcgacctcccgggctcagttcatactcccacctcagcttcccacgtagctaggggtacaggcacacaccaccatgcccagctaattcttttatttttctgtagacacagggtttcactatgttgccgaggctcgtctcaaactcctgggctcaaatgattcacccagcttgtcctccccaagtgctgagattacaggcgtgagctgccatgtccagccaacactaccaggcattgttccgaatcctattatcctattagtgtggctacttccaggtgatgtaatagctactaggactaccggatcctctggggaaagtgcctgttttcatacctccttcaataagtacaatgagtccctgatctgggacaattctgtgcaggctgccacgtgtataggaggtattcatgcttccagattgcggtgctggcctagtcaatgagcagagaaggcagatccatatccagaggagatcctgagtttgattaggaagagtcactgcatgtttccgtggtagaaaggtcaaatataagcatccagtcccaagtggccagcttgaagaattgtgtcgcactgagggctcagcatcagtctctgccgttgccacgtttggcatctggcattggcaaaagctagattagctttggtgaggaggagctgttgcttttggattcattcatagcctcagtccttgccaacatgaccgattgatgtcccattttattagttgagaagaaatctaaatgacacccacagttgagtcatcctcttcaactgatcgatgagtgccttatctgaagtggatgctctctagtgatataaaaaatccacatattacacccacccccattgggctatttacatatgactttcttgtttctgaatttccagtcctgtttctcccaggcctctttcccatcagccaagccatttgttactgcccaagtgtctctttatatccattctcaagccatttctttctcaaatctctccctattcaaagttaaggaccaaaggtactacttgcagctccgtctgcttggaaggctcttccttaactgcgctccctttggccacgcatgagtaaggccatagtgtgacatcttcattttccggatcaagttgactcatgtataatcccaggcctgagtgtttaactgttctatcaattggtgaggcctgtgtataactgagacagtagtcttactcttgtggctacatagttctgttaataattccctcataatgcttatctccagttgcatattttctttctttcaagatagaatcttgctctgttgcttaggctagagtatatatatatgtatatacaaaatatatatattttgtagagatgggatctcactgtgttcccaggctggcatattttcttaatacctatggggtcaggacttcagtttgtcctaaggacatcagtgtatgtagttcccttctgcagaaggcatgatcttattccaggaccttatggatgcatgtttgactcttctttggggctactagagactccccacaacatccttatccacaacagatatctctggcaacattctatatgctgggatacgtggcttatgtgaaagggcagcttctagaactattgtctaattctatggctgagtcctgtcttcctctttgtctccctaaaaactggcaacctgggtcaagataaagtaactgggatctgatttactgcctcatttgaaacaactgtaaaactggacaaaaatatgaacagttgttttcaagacattggatatcaggcagtgaaagattgtgatcgctgagagatggaagacaaacaaggtgagccctatgtttgccctctgcttactgccttgaggggatttctaggctgtggcacagagaaggaaaacccaggcagaacctagaggaccttctgagttgaagagagctgagagtttggaaagatcaaggcagctagatttcttagggcagggtactggataagagagcactacaggccaagcgcagtggctcacacctataatcccagcactttgggaggcggagacgggcagatcacgaggtcaggtgattgagaccatcctggctaacatggtgaaaccccgtctctactaaaaatgcaaaaaaaaaaaaaaattagccgggcatggtggcgggcgcctgtagtcccatctactcgggaggctgaggcaggagaatggtgtgaacccaggaggcagagcttgcagtgagctgagatctcgccactgcactccagcctgggagacagtacaattctcagtctcaaaaaaaaaaagaaaaaaaagaaaaaaaagaaaaaagcactacacagagaaagaatgctggaatcctccagagggtccccctttaatatttggcagaatattcgtcagcacattcatgtgagaaaactaccccaggcaagggaaaggactatccaagaagattagaggcaatagttccctgtgcttacacaggactcggcggagtgtctgttctcaccagccaaatcgtaaaacctcatattcatgagtttatcagatagcctgcacagaggtgtcttgggtcaggagaatgattagccctagaccaaatactgctctggttctgcctaacaagtcttgaaaagcaagatccaaaaggatcaaactgttgctcaatatcttcacagtatcagagaacaaagttaatgaatatttataggaatgcaaaaatttccagtacccaacaagggaaaattcacagtgtctagaatctaatcaaagatcatcaagcatatgcagatgcaggaaagcatgacccataatcaggagagaaatcagttgattgaaaccaagccagaactgacacagttattagagttaacagagaaagataatgaaacagttataactgtattgcatatgatcaaagtagagacacgaaaaacacaaaaaaggcagaaatctaacttataaggatgaaaactataatgtgtgagataaacattggatgggaccatcaggaaactagacatcacagaagaagatattaataaagctatagtgatagaactatccaaaataaaaggcagatagaaaaaaaatcaaacataatgaaaagggcacaaatgagttgtgggaaagcttcagatggcctaatagatgtgtagttggaatcccccaaggaggcagtcagaggaaaaatatttgaagaaataattttttcaaatttgcaaatcccaattactggagttaccagccagtgcaataaggcaagaaaaagaaataaaaggcatccagattgtaaagaaagaagtaaaactgtattttcaagttacatgatcatttatgtagaaaatatatacttttaaaaagctgctgataagtgagtttagcaacattacaagatagaagatcaacatataagaattaattatatttctgtgtactagcaaacaaatctgaaaattacatatttaaaaatttaaggtaggatgggcatggtggtgcatgcctataatcccagttagttgggaggttgaggcaggagaatcccttgaacccaggaggcagagattgcagtgagccgagattgtgccattgccctccagcttgggtgacagagcaagactccatctcaagaagaaaaaaatttaagatagtacaaaaaaatctgaagtaaggataaatctgacacagggtctgtaaggtctttacactgaaaactacaaaacaatgctgaaagagagaagaaaaagaagacctaaatcaatgggcagatacactgtgtttatatatctgaaggcttagtattattaacagatccattttttccaaacttatcccttggtgatattctttaggcccgagaccctgagacaaattacataactaaaatctaaaattcatcactaagctgtggggaagatttctctacaagatttttttttgtttttggagacagggtgtcactttgttgcccaggttggagtgcagtggtgcaatggttcactccagcttctgccaccccagctcaagtgatccccccatctcagcctcccaagtagcttgggactacaggcacatgctgccacgcctggttaatttttgtatttttaatacagacagggtttcaccatgttgcccaggctggtctcgaacttctgggctcaagcgatccacccaccttggcctcccaaagtgctgggattacagatgtgagccaccacactcagcttctaatgctttctgttttattttcttttaatctattgagctctctctgtactcaccaagaagaaagtctattatatttaattgagaactcttttctcagttggtttcctcatcacccaacctaattgtgtgtaactcccatctacatcttcgtgaaaagggcttaatttctctagttgtccatcttgatgttcagctttcattttcctaaacttggtttatgtcagctctctttttctagttaactcctctttgctcctgtcctctatgaattgcctagctttcaacagcaaggacagcaggtgctatcttatttaatttagatccataatattaatgcggtgtgacctcatgttcatattctccccacaaagttgagtgtttttgtatttctggcttcagtttgactgctttttggaactctgtatggtcataacagatatgaatgtttatggagaatctctgaggcagaattagcattaggctttttaaggttctcattggtaaatgatttggatttagataattattggttctttgtttagggatcattgtggaagctaagtgaagaccttgccagaattgaccaaactactctgtaacataattcattgttgacaaatactcccgagtgagacaagtgggagcttttaaaatttatatttttaatttgcttatgcttataatgtttaatagagtggtttaggtcttttttccattatgcgttggaatggatttttttgattatgtagaaactaacatttgccttcatactttaatccttgatataatggtccccaacttttatgttcatagagaacctggcattataaagaattaagtcaacagacatgcaataaaagatttttatccctaagaaaaggcaatgtcctctttcctgaaggttttctgaaattccttttttaccgacttgagagagcaattaatgctcacagtagatttgacagacggttctagtcatctgtgcttcactaaatatggattgcacattttctgcccctgatttaataaggaaaagtaggaatgaatgacgaatgcataatccccaaagcattgtttattttagagaaaatcacataaacgggaatcccagaggaggagtcttgggaacatttcaacattaattcttaggtctttggattggctttcataactattaatgaagataaagtttaaatgtagtcattcatggtatggcatcaataaaaagttatcgaagattaacatctaattgataccaggagagcttatattcattcaccagatttatattcccaaaaccagtgctacagattccatagaccctcccacacagggacctgtttattgcccttctcaagttaatatgaattttgaaataaataatacacagattaaataacttttacaaatattgtgttccctttgtatagcttccatcgttaccatactgtttaatttaacttcatattgattacttcaattgttttgaaagaactaaaaacataacctcagcttgcctgatgcctagggcctattagtgagctgtatacaccatcaaagtcacatatatatctctctcttaacaaatttcagtttgaattgtccttgtgtttttctgagacagcttgttatggcacagtctgggtttttcatttcattattttgctttaggagaaaacctgctatagactcatcccactttggattttttaaatttcatgtagaaaacttacaaaaataaaattgaaaacaattatttatcatgccattccaaaaagagaattgatgtatttccaagaaggacataaatggcttacagttatttttaccttaacccatatttttttttcattttaaggataagaataggctttggtccaaggtatgaaagcttattatagaacttggttgcttattttcatggaaaatagatattttcataccagcataaaaattaaagttgtggagaatagtcttatctaaagtgacataaaatggatattgacagtccccccaccactgaaagagaaaaatcttacatctaattttaacaaatatgcagatttttttcttatgaatcaaattaagttccctgaccacctaggggaagtataaatgttctcctctgcactgacgctgtggttttggcctgtaacaggtagattcggtcatatcatctggcagtgcttggaaaggactgctgaacagtattctaaaatagtattttgttagatgttttctaaaattttagtggctcatactcaagagaacttcttataacaggtaaatgtgtcccagtttaaggggattctttatcttcccatgatttttagtggtttaccaagagccatgtttttttgtttattttttcttttttcataaaaaaagaaatgattctacgatatattatttaggttttgctatgaccgtggtgagcacctagtaactttagaatatatttcagccaaaattattttggctatgttctagggtgtggaattttgaagggttctaaaaccacagaaaccaactttctcttgtgtgagctgttgcatggatggatattggggtgcccttagaatcagcctggagattgggcaggaacagagtgagccacagtcactctggaactggtcctctgagggtcctgctgctggccccaccaaatactggccatcactgcttgagccactgccctagttggcactggacactcccctactcccctggactagggctccactgtgcccccaccaccgctgctgtcagatgagttctcctttagccctcttcctgggcatcaccaaccccagatttaaaaatccagagcaaatgtgtctaattggccatgctgtgtctcagagctggtacctgtagaggcaggtgagtggtctgggaatatccagatgtggtcttttcagcctttaatttgagataagccccatctccacaaaagctcatagggtggcagattctccaaatacagggaagtggttcagatcctaggtagactgaaaatgtcagatgactagtcccagcagttgttcctgggctgagatggacccgatgctgcctcataaagaaattctagggttggtccagtggtccactcagagatgcaggtcacaactgaggctttctcctattagcagaaatggacatttaagcctttggtttttgtttggattttgtgttttattttctttgccattcctgataatgaactggtcctggaaaacactgtgttagttgagtagaattctgccttgatagagtgaatgcaaacattccctgctgtgttgatttgaaataggaacaggcattttctatactttagtggcatatggtgctaagattttatcatactttcttataaagagccaggaaactttgcctgcttaaaaatgtgtgtttataaacaatagacttacaatgaatattcccatctgttaggtgaacataatttgtgtaggaattcccataataggtggaggactttgcaactttcttcatattttttccttggtgagacattagactaaagagatggtacaaaacagcatatgcttaatattcaattttgtctctatttctgcttcttgtttgaaagcagttctatttttgggcgttagtacggaggattactatagaaattcataagaatttaagacctatttaggtattgaaaaacaggaaaaagtagaatgagcaatcatataaatatggttatgttgcagtgataaaactgtctttgtaatgtttcaaatacatactgcaattacttgtgctatttcttcccaaaaacttttgttgactttgttttaagctaatctcacagctcccctctgttgtaatcacagcatgtaataatcaaagccgcacatactcctggtctggatttgtaatttaaataaatggcattggctctttgcattcaatttgacattattgtgattgtattcaataattaattttgttttagatgaaccattccacataaaagaataaaaattttaagattaaaactcaacaatattttttctctttataaaagattttattaatccttccctaggagctcaagaagattatcagaggggaaaacatagtttgattaatttttgtttaatcttgaattacctgtgttgtccaaatgttttagtcgcttaaaattatgcctatcagttcctttttcaggttgcctaattgtgcatacttgaataaaaacatgagcaattagttgaatataagtgattcaagatatgcttgggaactgagcaaatacagcgtagcatacactttgtcttttactcgattttgaaaaagtttctctggttatactttgtaaaaggaaatacttttaaattgtggacaagtattactggaacatctttttgggtgggtaaagtgtaccgtcactctgttttcttctcccctttttggaaaatagtcttttcctatttgagctccttttcttttcttttttcttgagacaggatctggctctgtcacccaggctggagtgcagtggcacgattttggctcactgcaacctccacctcccggggtcaggtgatcttcccacctcagcccctaagtggctgggattacaggctcacaccaccacacttggctaatttttgtattttttgtagagagacggttctgccatattgcccaggctggttccttttctttcttacggtagacaccttcccatatgtgaaaagcatccaatcctcatgtcttactcttttgttttttgttcaaatatgatgtaccttattcaactgcaatgtgcatatattcatttttattttttaatacgatcaacatagaaaaagctgtacatatctaatgtatacagcttgatgagttgggagataattatacgcccatgaaactttcaccactatatgtggcataaatctctccatcacctccagaagtttcctcctgccctcttcattattatttttgtgtgataaaaacacataaaacttaccctcttagtaaactttaaaatatgtgatacagtatgattcctgtaaatgctatgctgcacagaagctctgcaggactcactcatctcatatggctgaaacttcctgcccttggattcctccccgcttcccctcccctgtacccactagtggccaccatttcacactctgcttctatgaactggactattttacattcctcttataagtggtatcaggtaggatttgttcttctgtgtctggtttacttcacttagatgaacctgcatgacgtcatgctatgtagcaaatgccaggatttccttctttttaagactgaataatattccatcgtgtgtatacaccaccttttctttcgccattcctcagcagactcctgggttgtttccatctcttggctaattgtggataatgctgcagtagacgtgggagggcagacatctgagattcttctttcagttcttgggaaatatactcagaagtgggatttgggggtcatgtggtcattgtgtgtgtaattttgtaagaaacaatttttccatagtggctacaccaacttacattcccatgtacagtagttcctttttctccacgttgtcagcaacatgtgtttttcatttttcgatagtagccatcctaacaggagtaagatgacatctcattatggtttgggtttgcatttccctgatgattagggacattgagctctttttcatatacctgttgaccatttctgtggctttggagaaatgtctgtctagtatctttgccttattaaaattaagttgtttttttaagcttttttttcctgatgcagagagagagagagagagagagtgcgtgcgcgcgtgtgtgtgtgtgtgtgtgtgtgtgttttgagagagtgtcttgctctgtcacccaggctggagtgcagtggtgcaatcttagttcactgcaacctccgcctcccgagttcaagtgattctcctgtttcagccccccaggtagctgggattacaggcgtgtgccaccacacctgctaatttttgtatttttagtacagactgggtttcaccatgttggctaagctggtgtcaaactcctggcctcaagtgatctgcctgcctcggcctcccaaattgctgggattacaggcaagagccaccacgtctggcctctcctgtattttggatattagctcttagctatatagtttgctcacaccttactcttaatttgtctgtgaacgtggctgagaactcaattactctaccatcttgggcagcttagaagttgtgggctccggagttgtaagacgcatttcgagtggcggttggttacctatctttacttgctggtggattttaaaacatcctaatttacaaaaccagcagtaaacctaaggcaaggcttttatagaaactgtatcttttaattatttttttcctttgaaattgtactaaaaaatttagacaggcatggatttgaaggatgattacttacagttacagaagtggaaaatccaaaggaaatgactttttaacctctgaaaaagtttttaaagttaacatcagggaatacgtggagaagtaaggaaaggaagtgaatacattgtgctgagagatgtccacattggtgactggagagagacgccctgatggcattgctttctctgccttgacgagttctgtatctcatcctgaaagtgttgtttgcctcttcctgtggagtgacacaagacatcgtgttaagactgttgccagttctaggaatctttggaaattctgatgttctacagagagagaattataaacgatttttgattgagagggctagtttaaatgcagtgacttttaattatataacctttctcattcaaccagttgtgagttatatctcctgtgtgcatggcactgtgctagataccatggttacagtgatgaataagacagaagtagatcctagctttgggtgatatttaaagcccagttggggagacaggtatcagtgcgataatctcagaaataaagaaataccatttgacccagccatcccattactgggtatatacccaaaggattataaatcatgctgctataaagacacgtgcacacgtatgtttattgtggcactattcacaatagcaaagacttggaaccaacccaaatgtcccacagtgatagagtggactaagaaaatgtggcacatatacaccatggaatactatgcagccataaaaaatgatgagttcatgtcctttgtagggacatggatgaagctggaaaccatcattctcagcaaactaacacaaggacaaaaaaccaaacaccgcatgttctcactcataggtgggaattgaacagtgagaaaacatggacacaggaagggaaacatcacacaccggggcctgttgtggggtggggggaggggggagggatagcattaggagatatacctaatgctaaatgacgagttaatgggtgcagcacaccagcatggcacatgtatacatatgtaactaacctgcacgttgtgcacatgtaccctaaaacttaaagtataataataataaaatttaaaaaaaaaaagaaataaatggtggttctagttagtgtcatggttagggaaggattgcacagatactaggttaccaaaaataaaatatttgttgagcatatactagatgagatgccagtgctgtttgataaaatagcatctgatggttagatataaccatgaaacactggatataagcattaacacttctttttgctattcaacaggtacattattccatctttgcagaagctcgatgctgggttttaccgctgcgtggtgcgaaacagaatgggagcactcctgcaaagaaaatcagaagttcaagtcgcatgtatgtgtacagtaaggagatgtccaaatgttaaagaacaaagtgtcgctggggagtcaatcagaatcacttttcaccattgtaggaactgagagtttatctttggttctattttgagtagaataattgcaaaactcagtgagagataagtaagcagccagcgtggctggccaggtgaggggctgttgaggcaaagggcacttttcttcatttgaaaagactcaggaccctaagaggccctggggaggacgaaaaagtgaatggggtgccttctgttttaggaatcagctgctcttagcttgtactatgtttggattcaaaatgtttttaaagtataaagttcaacccaattaggtcaaagttcgtcattgtcagttctttccagtgacgatttgtttagaaatcatgctgcaccacaaaaggtacatggatagtgagcgtccccgatggcattcatgtgatagtgatttattaattctttattcagcagatccattttggagaacgaaacttttaaaagtaaacaaaggagatatcaagaatgcaggaagcttaaattttcatgtagtcttgaggagaaacaggagagcgaacttggcctatgaaagtatttagtcctttttctaattcaaaatctatgaagagtaaaaatggactgtctgctttattttatgtacatatgtgtatatataatagagacataacatatataattatatgtcatatatatgttatatatataaataaatatatgtttgagatagggtctatctctgtctctcaggctggagtgcagtggcacaaacatagctcactgcaagcttgaactgggctcaagtgatcctccctcctcagcctcccgagtagctaggaccacaggtgtgtgccaccatgcctggctaatctggctaatttcttttgtttttggtaggggagggatcgcactgcattgcccaggttggtctctaatgcctggcctcaagtgatcctcctgctccatccagccttccaaagtgctgggattacaagagtgagcttggcttgttttactatattttgaatgtattaccaaaatttctctttgtttaaaagtaagcaaaaaaatgttataagatgttaaattacattttaatatatcattataaactttagagaacaaaagagctcctgagttgggctgtactatttggtgatgacagaatttcctcatttgtcattttaaccccaattaagtcttgtagctttcagtgtgagtagatgaaataaaataatatctagttattttaccataagcctaatgactgagtgaagtggagatgctatacatgtttgatgctttttaaaatcactaggaaggcttaaatttttctaaattgtgatgccgaagaatgttgcagaataattgagaacttttattcaattgaatgattgaaaatgtaatcattaaatagagtgaagacgaatacctaaattatattttaagaagagcttcaaaattattaaactctgttttataaaactgaattttgcttaattatgtttttgtttctgttctgtatctctagctcttcaatttttttttttcttttttgagacggagtctggctctgtcacccaggctggagtgcagtggcacaatcttgactcaccgcaacctccgcctcctaggttcaagtgattctcctgcttcagcctcctgagcagctgggattacaggcacccaccaccacacccagctaatttttgtatttttggtagagatcgggcttcaccatgttggccaggctggtgtcaaattcctgacctcgtgatccacccgcctcggcctcccaaagtgctgggatgacaggtgtgagccactgtgctctgcgtttagattttttttttttaatctttcttttctcctttgctttgataacaaatttcattttcttttgaaaaaactatgagtatttttctaatctgttttgttggtttgtttcatcttttccctcaagtattagacactgtcacatagaaaatgtcttttgactgaagaagacattgataatagagcacttctgtggactatttcaaacttatttatgtttaaataaaaatacactattttgccatatctgtttgtatatatatttacatctgaccataatatggaatcttattcaaaattttcaaatgttacaaattttaaaattagccttttatacctacattctaatagctatgttttgtcctatgaccccattttttaaattttttttatcagtagaacaaatactggaacaaaagctagttgccccagattaagtcaacagtatgagagtgggagaatagtatatagactcttcagtggttaggaaatattgctcccaaaagatctgtgcaggagacagtgacctcacaaatgaaggaaacaagctgaagagagcaagggccggtgccgggctggaacgagtttgaaagatttaggagctaggagatgtctggacacattttctgacagtttctgagaaaactgcttcacgtggctctaggatggcttcagcatttcatttcagtgtcacagacagttgcagacatttccttgtattgtcaggtaggacaaagaccatgtggctttgctgaggaatgtgcagcgtgggcgctttggaggcgcgtggcttgcccggtgcttcactcgcaagcagatccgcgttggtcagcgctgccgtgcagtctcgctcgtcctggtgtgaaatgtggcagcatcagtgactttactgtaacacttacctgtttccatctgtgaccccttccctcccccaaaaatgttttctagaacttgaaagcacttctttttctctgcagatatgggaagtttcatggatacggaccagaggaaaacagtttctcaaggacgtgcagcgattctaaacctgctgcccatcaccagctaccccagacctcaagtgacttggtttagagaagggcacaagattattccaagcaacagaatgtaagttgctccaaacgttaaagcttcaaatacaattgtaatgtcacttgctggcaccatctacacagtaagtgtaccaattaaggttaccgatgatttaaaaagagcaaactagtctaggagtcctatcctaatttttaataaacagctatttgaggactggcttgaatatttttaaccagtttaagcaaataactgtctaatattattcttcagaatgttgcatgccctaaaactaaagcagccttacccaactttgcagtccatttttttcttttctgagtgtactttttaagatgtcattgtcatccctgagttgggtttgcctcctagtactaatttaatgagtgctggtatttacttacagtgctgtggggttttttttccccctccttttattgagccatgtttgatactgctttctctgacgataaaacagtaattactgcttatttctctttatccttttatcctaccatgacagttttatttctcttcatctaattagtggttcacccatctattgcagaatagttgctttgtgattagttaggcaagaacatcttgaaataatgcttatctcacattcaagatatttatctaatgcccgacaggttttcttcacttggagctttaagtgattaaaaagaacacttggtatatatttcataactggacattttacaacctaatttaaagacaatattccaaacataaaggtttcaaggctgaacatttccagaagaatcatgaaatgctataagcttaggccagaagtcagatatttatgccatccagtggttgcactcagataaaaattcatcaggagcaaatactattgttgtgctttttcaaaaagaatatgtgtgaggtcatttgccaaatagattttacatctaactgtgaaagtcactgtgggaacccacctgctctctcccctacctgagcatctgtggaatcccttcccgaagccttgtgattctcatctccaaccctacctgagcatctgtggaatcctttcgctaaatctcatgattctcctctccacccctacctgagcatctgtggaatcccttcctgaaggctcatgattcttgtctcccacccctacctgagcatctgtggaatcccttccctaaacctcatgattctcatctacctgaacatctgtggaatcctttccctaaacctcgtgattctcatctcccacccctacctgagcatctgtggaatcctttccctaaacctggtgattctcgtctcccacccccacctgagcatctgtggaatcccttccctaaagctgttgattctcgtctcctacccccacctgagcatctgtggaatccttcccctaaacctggtgattctcctctcccactcccacctgagcaactgtggaattccttccgtaaacctcgtgattcttgtctccacccccacctgagcatctgtggagtcccttccctaaacctggtgattctcctctcccacccccacctgagcatctgtggaatcccttccctaagcctcctgattctcttctcccatccccacctgagcatctgtggaatcccttccctaaacctcatgattctcatctcccacccctacctgagcatctgtggaattccttccctaaacctggtgattctcctctcccacccccacctgagcatctgtggaatcctttccctaagccccatgtctccagtcttctagttctggaccaggatctggctggaacctaaataataataattattattattactattaataattatataatacttataattaataattattattttgagacagagtccctctgtcacccaggctgaggtacagtggcgtgatctcagctcactgcaacctttccctcccaggttcaagcgattctcctgcctcagcctcctgagtagctgggactgcaggtgtgtgtcaccatccccggctaatttttgtgtttttagcagaggtgaggttttaccatgtgtccaggctagtctcgaagtccttacctcaaatgatccacctgcctcggcctcccaaagtgctgggattacaggcatgagccaccacttaagcttatttcacaaatgtttctattttggttattgggaacaaaaatttatatatatatatatatatatatgcatgcagcatattttaaaattctagtaaaaataccagttaccttagaagatgggataattgctatccttttttctttatttaattacaagttacttaggtatccacctttatattgattccaataataaaagatgcctcgagtttcgatgaaacaaaaatgaaggatcaatttttcattcttagtagactgttaggctttaaaaaggcaggtaagggccatttgcggtggcttgttcctgtaatctcggcactttaggatgctgattgcttgagtttaaagcaatctggagtttaaaaacagcctgggcaacatactgaaaccttatctctactgaaaattaaaaaaaaatagctgggtgtggtggcacgaacctgtatttctagctatttgctacttgggaggctgaggtaggaagatagcttgaggccagaagttggaggttgcagtgagctacgatggtgccactgtactccagcctgggtgacagagcaagaccctgtctccaaaaaaaaaaaaaaaaaaacaaaaaacaacaacaacggcggggcagggggtggcaggcaagatacattcttgtataaatattctagaagtttccagtgctgaccacagtatgaccaggcaaacttaggataaatgttgggggagaattggtaccagggatggggggagttagattgaattaggctttcctctcaagcactggagcttttaattaacgtcagtggcagcaaaattcatggtggaagaattctttcaacttagcagcaaataagtctgtattaatctacctgttaacctgtgttctcactatatgcatgagacagcacttattcacgagtatgacagggtatagaatgaaagaacttaatttcataaattttttaaacttgcaaatacatgctaaagcctgtttaattcctggtgagctaataaagtaaagatgctagaagggctttaacttggtgtaatatcaaacaaatggtctgcttacaagcatgaagctgttggtaaatctctaatctcaggaaaataatgcagtataccattttttaaagagatgagatgaggctgattatggatatttacacttttacaaggccctttagtttcgtattttccacctcatcatcaccccaagtctattaagtacctgctgtgcaagattacataaatcagtatggatatgtgtttttctccacaaatttatacatcgtccaaagacatatagctttcacatcccaagtacactgatttgatctttacaaattatatgaatattaaatgatcacatgtaccctgaaactatgtacatctattatgcactaataaaaagtttacctgtttaaaaattaaaaaatctagatgcgaaaacccaatatattgctttccatgtctaagaaagtacagtttttgactgaagatgggagggtatctctgcattcctcgcacccacgggattggtagcacaagtcagatggcatcatatttgttatatacccacagagatgccatttaaaaactagagcatttgactcaaggtgcttcccacatattgaaatgcaggtgaagtttctgcacctattttttttttatttttattttttgagatggagtcttgttctgttgcccaggctggagtgcagtggcccaatctaggctcactgcaacctctgcctcccgaggtcaagcgatgttcctacctcagcctcctgagtagctgagattacaggcgcaccccactatgcccagctgatttttgtctttttagtagagatggggtttcaccatgctggccaggctggtctcgaactcctgaccttgtgatccacccacctcggcctcccagagtgctgggattataggcgtgagccaccacacccagcctttctgcacctatttttaacctccttgtgtgagtttggttccctaatacgtgcacctttgtcatgtggtgaaagcagttcattttctctccccacctccatgtttaaacattacctcattatctgcctttaaaatgtgggctttaggcttataattaaatgattttttttttcattttcaagggaaacagtaagtctaatgttttctaacttgaaaaataagttgaatatcctattaataatcttaacaggagctattatttattgagtacctactttaaacatatcttctctaatcctcacaattgccttctgaggcaggtataattagctctatgtatagttatcagaatggaagattatggatgttaaattacttaccccagggcccccagccaatacacacagagccagggttcacacccgggtctgcctgacactcagtctcatgctcacttctggatcagcctgattctttccactttattggctgataattttttatgtttttgattattttttccatacattgctctagtctttctcatcatttagaagaccagctttcaacttgaaaagacatggattaacctgggtttgcatagaggggttgaaaagtgtcagaggctggtatgttttgaaagtagagacaatctacaattatctcagatactatgtttaattaaaaataggtggaaaaggttaaataccttatgattccactcacacaagataattagagtagtcaaattcatagagacagaaagcagaacattggttgccagggacttgggggaaggagggagtggggagttatgtttaatgggtacagagtttcacaagatggaaagatgtgctgaagatggatgatggtgatgatcgcacaacagtgtgaatgcacttaatgccactaactatacttaaaagtggttaaaataattaatcttaggccacggatggtggctcacacctgtactcccagcgctctgggaggccaaagcaggaggatggcttgagcccagtagcttgaagctgcagtgagctgtgatcacgctatagcagtctagcctggatggtaaagtgagaccctctctctattttttaaattatattttaccacgattttaattgtctttttttttccaaaacaaaaaataacgtcttccaaagacttcccactgtgtacagattaaaatccagattccttcccacattctggggctacagggccagagtctcttgcagtttagcaaatacatcaagctcttttctgttttgaaagttggagacagtcttgctctgtctcccatgctggagtgaagttgaagtggcatgatctcagctcactgcaacctccaactccagggctcaaatgattttcgtgcttcagcctccagagcacctgggattacaggcgtgcgccactatgcctggctatttttttttgtatttttattggagactttgtttcaccatgttgcccaggctggtctcgaactcctgacttcaggcaatccacccgcctctgcctcccaaagtgctgggattacagaccaccgtgcccggccagttttaggtggttttgaccacctaaaatgtttttgtttttctacctacatttggcctcttggtatgcataggagatacacagtgctggaatggctggatgaatgaatgtgaagaaaagtcgtgtaatgtccacagacatcttcagcagaaggggaaaaaaaatgagaacaaacctcaaggaaaaacgctgttgatgaggcagaaaaaatatcttggaaagacgaacagtatattgagagaattgaaaataagttatattcagaatttgaataggtaattacaggttttatctgagaagttgaaaaccccatacatttatttttctgatttactgagtccaaagtttgctatctttgcatatcaaagatgagcttagctttgtcatataaatacagtctaatttgataataaaattgttctgtgttattttggtttagatatattttctttatttccatttatttctcaaaatatgaaatgtgaatatcgatgccatgctgtacttctctttcctccacgacgttatttatgttggtagttatcagattagaacacaaaatcttaactctgtacagtgccattcttgtgcttaattgcaggttcttgtgctcaaattgcatcctgtagcctacctgacaggaatgtgcaagcacaagtattcttgaatgtttttttcctggaaatgcaaagtttatagatgaatgtttcaaaccttcagtcagctttgcaatagacaacttgccagtaatgatctggattgtgaagtatgggcagtaaacagcatcccaggtgactcagaaacagtctgattcataattgtccatgcttaaatacttgaacatccattaacttattaccatttcatttcaatttcttcaagaaagatttgtttaaattagcgcttgcattggaagtcacaacttaatgctcgaatgaagtagatctggttgtaataatgtttttatagttaactaggctttcaaaataatgtgcttttaaaattttatattttataggcattttgtgaatgtttatagagtatatgtgtgaaccgagccatatttggtataagtaaaacagacgagtagatacgggttccaggcctgctttcaccgtaattctgaccttgggaaaattacttattctccctttgcctccattttgccatgtcgatgaaaagggttttctaatcacttctgcaatcctttctggtattaatgttcagtgctgctgttaaggaagggggtgccatggcagttgttcttcccctccctctctttcttccttcatgcatccatggacatttcctgagcacttaattagtgccagccactgttctgcttgccagggacagaaaggggaattgaggcatcccacgtgtgcccctcagtgggtgtgttctgatatgaagcaggtaatacacaggacactttggggtgagggtcgtgctgccacgctgagaagacatggatgggtgggaagagagtcctaagctggagggggttgaattgagtgactaaggacaggtcctctgtggaggtgacattttaaaaaacaccttatagagttataatttgtatataacaaaatgcgcattttcaaagttcatagatggatgaatttcaataaatatgtgcacagaagaaattgccatcccaatcaagagagttcgtgggcccctcctgctgttggtatgcattcctgcagctctgccctcctgcttgtctaatttctattactgcaggctagatgacctgctctagaatttcacacaaatgacatcattgaatatgaaatcctttttctagcttcattcattcaacatcatttctgtggtattctcaatgtgatccttaataataataataattaatgatttttgagtgccaggcactgttttaaggattttatttataacaattcacttaatcttcacggcagcccagcggtttagtactgttattatcgtggctttcctgatgagaactaaggcagagagaggccagcagttggccggcgtgggagccacttgactcctaagtccacaccgttccaccgtgtatatgaggctgttctcccaggttaatgtctgcaagatgggaaggagccagccctgtagagccccagaggatgagtgttctaggcacagaggccagaaacagaaaagagcttgatgtatttgctaaactgaaagagactctgaccctgtatcccctgaatctgggaaggaatcgattttattctgtacacagtgggaagtctttggaagaggttgctattttttgttttgaaaaaaaaaaaaaggcaattaaaattgtggtaaaacatagtttaaaaaaaatagagatagggtctcactttatcatccaggctagactgccatggcatgatcatagcccgctgcagtttcaagctcctgggctcaagccgtcctcctgctttggcctcccagagcgctgggagtacaggtgtgagtcaccatccctggcctaagattaattattttaaccacttttaagtatagttagtggcactaagtccattcacagtgttgtgcaatcatcaccatcatccatcttcagcacatcttttcatcttgtgaaactctgtacccgttaaacataactccccactccctccttcccctagtccctggaaaccactgttctgctttctgtctctatgaatttgactactctaattatcttgtgtgaatggaatcatatggcatttatccttttccacctatttttaattaaacgtagtatctgagataattgtaggttcacatacagtcaaaagaaataatgtagggtgattttatgtaccttgtagctagttttcctgagtgttgagatcttgttaaactgtgttacggtatcacaaccaggatactgactttgatacatcaacaaacagaaggtttctgtcaatactaggatttctcttattaaccttttatggccataactactttcctcttgccctcatccccttcttaagccctaataatcactaatctgcttttcctttctaaagttttgtcatctcaagaatgttgtgtagacagaatcatgcagtatgtgacctgtggggattggttttttttttttttttaacttagtataattccctgattcatccaggttattgtctgaagcctagttggtttcctgttgttgttgtctagtgtttcttggtgtggccataatgtgtagtttataatcattcacctgttgaaagcaatctggattgtatccagtttttggccatgatgaataaagttgctataaacattcttgttccttttttctgtgcatgaacataagacttcattgtgttcatacacacacatgcccaggagtggaatgactgggctgtatggtatttgcatgtttagttttagttttttttttttttttaaatgccaaactgttttccagagtggctgtaccattttgtaatcccaccagcaatgtacgaatgattgcgtttccctgcttcctcactagcatttggtgttgtcatgattttttattttagtcattctcataggtgtataatgatatcttcttgtgtttttaaattttcacttctctaatggctaatgatgttgaacatctcttaatgtgctgattttaaaaagaatgaaattagaaaaaagcaaacttcttgttgtgagaaatgtgttcatttatttgaaaagtcagttgaatgggtgaaagagcagacaatatgcagctaaagtgagacttattgttctgatctgaagaaattactcagaataaaacacagaggaaaaaatatggaaaatctagaaggaaggccaagagatctagaggacagagtaatcaatagacgtccgatggagaaaatgggggatagatactatgcagagaccaatgctatgacgtttcctaagatgatgactcttcacagtccagaagcagaatgagctccaagtaagataaataaagtaaatccaaatctatacatattatggtgtaactgcagaacatcaaagacaaagaagaaaccttaagacaaccatacatgtaattcaggttgcctcagaggaacggcaatcagaagatagctgagagcagtaatagagaacagaggggaatgatgtcttcgaacgccaagggatggaactgctgccatggagttccgtgtcagctaagccaacgatcccaagtcggggagacaggacggtattttcagacaagcctgagaatttatatttccgagaagattgctgaaggatctatgaatgagtttgaggaagaaggatactgaatctagaaggcaatgcagggttagaaatattggcctccgttttatgttctctagttaggaaatatttagtaattggagtgtttaaatatttagatattagatgaggaagtggagacagcaagttgagacaactctttgggcatttttcttgtgagcggctgcagagaaaccgcgcgtgtctctgaggacacgaagtcaagagagctggttttttcttaccatgggggatcccagctattatttatgtattaatggaagttctccagtagagaaggagaatgtgaagagccaggagagagtgaggatgccagggggaacaaagtcctggcaaatgtgacctggacatgcacagacaagcctgggaaggagggcctggagtcatgtggcacggccttcatggtggcatgcggtggcccctcatggcctcacagcttccactctaacaggacggagccagaatatgcgcacggatgcatgtggtttggtaaacgtgcttgtggaaaattgagagatttctcgtggatttttattttctctatgaatatggggatgagtttagaagtttagagtgagggctggtgtgagaagagagagtattaggttatcattcagacagtcagaagcgaactagggaaacatgccagacttatggggacttttgagagcaagggcacagttgcagtttgtggtgatggatatcttcagtaaagtttggaagttctgatgccactgtagagaaggcagctgattgggttcacacaaggttgaagtgtagcctaactaccatgtggaattcagaagcgagggtcatgttgaggctgtctgcaagggagtgatgagtctcgattgtctccgagctttataagagaggaggtgaaggatgttccagtaggatagaatcagaagactgcaggagtctattgactggaagaataattgcagtgggcaaagaagtgggtggactgagcacctcacgtcctctcttcctcactttggctattccattcagtgccaaacagtggacttctcccccacttggaaggaatctggtgacgcagatgagaaaagtcgcaggcttaaacttgtgtggggtgagcttgaatccttagggaatcagcgaatgcttgagtgcaggtggatcagcagacagattactgacgccaccccagctgactgttaggtgacacatagcttcgtgcagcctctctgaagtcatcctgtgggtcacccctccttcctctgtgctttccccttccctcctcactccagggtccacgtgtaagctgttgtaggcgttctgttttcttgaaaaactcggttgtcacttggggtatttgaaatctagacttagaatggcacttttgttgggattgacaaggtttagggagagaccatgaggatgggggccaagattgcatggaggggcagatcagtggtggtgagaagtgtaagactccaaggccacagtgttagagtagatggtaacatggatgtaaagccaccagggagggtggcaggagaagccagtggaggaaggtagggattccagggctacagtcctcaggaaatggagagggaaggaggaattagaacctcagtagggaacagcattgagaataaacgcatcccaatcacatgggcctcagaggaactgggatttggaaggtggaagaggagaaacgggttgggagtgctggctcacagctgtgatgagggtttgctctagctagactagacaaagtgaaggccttctggagctgctcctttgggtatttggctgcaggaccttgcagcttagaatctcacctagtgggtttctgctctgttgcacttcagcttcacttatgaagcagagaggatgatctcttcctcctggagcagttgtgagatttaacagaagagaatgagcaagaaagtggtttgccaagtaatgttcagagatggagagtatatgctatatgccgcccctcaaaaaaggtatgcaggggtgttcaggtaaaaaacgttcatctttctgtggctctctggctggcagtgcacgtagctgtctctgtaacttagagaggacgtgggaggaaggaccctggtgtagagaatatgctggagccatgggcagcccctgtgccccaccgtgcttctgtaaatgtcacactgctcctccaaatgctggtttgtaaaatctagaaagttcttttcgttgttgttctcaccacatccaggaagatggggcacagcgggagtccccttgtctgaactgctcttatcctggggcaaattagtgtccctcaacgtgagtaagaagatggaaagcgccacattgctttcatgaatagtctgcagactgctgatgagctccctgtcaccgcgctttattccagagcctcaccgtgcagagcgagaggtggactccgatgcttgtgaggatttcgtgttttctttcagattgtcaggtagtgcgataaagggttaccttataagcaataataggtcaggatatgggctgttgcccacagtaagtttgacatctacaccatcacatgacgcagttggacttaatgaaggtcactcaagtgtcttctcttttggtgatgcttgttgggcacctgtctgcaggtagatgacactgtccctgctgcttcaggagaaagggcacatcacagatagagaaacgtttctgtgccaagtgaatagcccaagagcatgggggatggggatcgtagaattgcttggttccattcgagttggccatgtagtatctaacttaaatgacaggagtttaatattctatgtaccaatttttcactggaaataaaatacttcatttcacatgagcatatcttgtgacaataatgcatttctttaccaatattagcccattatacatctgaagtcagttgcacataattgcagttcaccaactctacataatactttaattaaaactaggataattaaaatacagttttaatgaacaataaattctgaagttgccaggcctggaatgtgttagttgaatcatagcttgctttttttttttttggctcttaaatctgtacccacattatattttgaaatggcaatgatcacaatcaagaggcattttaaatgcatataatagtatgtactaaaggccaggcaggtgactcacacctgtaatcccagcactttgggaggctgaggcaggcagatcatctgaggttgggagttcaagaccagcctgaccaacatggagaaacactgtctctactaaaaatacaaaattagccagacgtggtggcgggtgcttgtaatcccagctactcgggaggctgaggcaggagaatcacttgaacccaggaggtggaggttgcggtgagccgagatcgcagcattgctctccagcctgggcaacaagagcgcaactgtctaaaaacaaaacaaaacaaatatatatatatatatatatatatatatatatatatatatatatatatatatatatgtatgtatgtatataaaatgtgctagtaaatcatatctttcctatggctgtcttatatatctgtctatccctcttacatacacttgcttatttgctgctaattgtaatcccagaaatgaggaaaaggttttatttttgaaggcccagcaacttaaaacagcacctggtcatactaagtagtgaatatttattgaacaaatagataagtgtttcttggatgaatatataaataatagcacatggtttgttctggggagatggtgtgagactaagtacactagatcgagactcagaaaacaggtttcagtcccggccctgccacgtggtcgctgtgtgaccttgggaagatcagttagctattctcaaggaagttgagataagggtatatatcaaatggaaataatgctggccacctcaccagtgtctgggaaataggattgggtgcgtttatttgataaattgaatatacatgtggaaaccctgtctaaaccgtgaagtacgcatggtgtggtgggattgtgaccccacctctgctcacggtgttctccaattgtctacatgagcacacattagtattcacagccagctgtttctcagctcatttggaactttgtatgttttaggtagtttttgcataatgaattttcagcccttggttggtgataccttgtaagtagatatgccccctccatccttcccttctcctttacttccatcccatttgtaatgtccttgggaaactcaagtgagtcccactgctgttggctcctaagagagacatttttgctgcctgtgtatctgctagatagtttgtttcacagtcaaatataagtgacttttactagcttttttctggactattagtgtcagtgctactctccccaaacacaggtcatttgttcctctgacaaatacctccttgcactgacattttcttctggaagtcactcccgaagtgcaaaattccctcaaaagcaaatgtactttggactctaagggggtactgctggagtcaaaaattaagaaaactttgtaatgctgtttaattcatgacccagacccagggcagggtccttaagagctgcttctggtgacactgcaggatacatctcacctgtacccctgtggaaagccaagggtcagtgggactcaacccatacatgctccttgggaactctctctcatgacaagcctggtcttatctggtcttatctcagggtgttttggtggaaatctttttttttttttttttttgagacggagtctcgctctgtcgcccaggccggactgcggactgcagtggcgcaatctcggctcactgcaagctccgcctcccgggttcacaccattctcctgcctcagcctcccgagtagctgggactacaggcgccggccaccgcgcccggctaattttttgtatttttagtagagacggggtttcaccttgttagccaggatggtctcaatctcctgacctcatgatccacccgcctcggcctcccaaagtgctgggattacaggcgtgagccaccgcgcccggccttggtggaaatcttgactgtcaaagttaccttctcccccacaaaggaggagggggaaagctgccgtctagaaggaaccctagggagaaagggatgtgcttggaggtcaagaagagtcacagggtgtgtgtcccacccagggcattcgtgcaccttagggctggggccatgaggaggctgtaaactggaaagatcaaggcagtcgtacaaagacagggcaaaacatgctaaacagatgagaggcagacagctgcagctgtctggaggtgctgtcacagttggcacccagtgtctacagggtgggttccctctttgtggaaagggaggtagcattcccgggtggggcacagcacaccctgccgagtcctggaaagagggtgaggagcgtcactgtctggaaattcagggtcctacccaaatgtgaagtgtgtggaggcagggtggtgtggaaggcacactggatttaaagcaggaagagggactgtgagagccagctgtgctctctcgtcactttctgcctgtgagcaagcctgacttaatgtttaggggactcgggtttttttccacctgtgaaatggggtcaagccatctgtttggcctctgaggaggtgtggaaggagctggccatcctcaggagggggacattcctggaggcagggccaggcagcgtgcagcctatgcagatgatgtggaggcacgtatgtttttcttatctttctgcgagactactctaaatcttcacgacatgctagtaaagaaagcagaggaagtcttatcacaccaattttgtggatgactgcagggggaaagaaagtggctaaatgatataaggtcaagtcatctgtcagacatagagccgaggatggaggttggcatttgaatgatacctttgtcatcattttcgtgaatgtttatgacaaagtgggtctcagcctgcccatgagggtggtgaaatggccaaagggtcctgcacaggccttgggccccgtgatgcttggtgtctaaaggcaagtgcccgacttcggtggggctccttctcttcatctgtagagtgcaggtgataacaccctggcttgcccgcctcacaggacttttactttggtgcgtgatgatcacatcccctcacaggtgttaagagccctttgtgaatcatgaactgtcatagccgtgaggtggaatcattttctcatgagggcccattctttgctgtaatgagatctgaccaagcctggttctgtctaattcctacagcatttgcttccaagtgacagcccctaatatcgaggtcatccttcatttattctttcctccagtcaatcagtgagcactgtgctaggctctgcggataaaaagatcaatacaatgagtctggcttctgaagggctcacattctgctgagtgggatacagccatcttttagttcatctcatgtagtctttaaggaaaaaaaaaaactttattgagatgtaatttacctaccgtaatgttcacattttcacaaaagcacctaattcagtggtttttagtatattcacacggtagtagagctgtcactactatcttcttttttttttttttttttttgagacagactcacagtctgtcatccaggctggagtgcagtggatcgatctccactcactgctgcaacctccacctcccaggttcaagaaatcctcatgtctcagcctcctgagtagctgcgactacagacacctgccaccacacctgactaatgttttttgtatttttagtagatatgtggtttcgccatgttggccaggctggtctcaaattcttgacctcaggtgatccgcccacttcagcctctcaaagtgctgggattacaggtgtgagccaccatgcctggcccatcaccactatctaacagaatatttccatcaccccagaagaaaaccctgtaccccttggcagtcactcatctttcttcccacttctcaggcctggcaaccacacatctacttctcgtctatatgaatttgcctattctgtcactacctaacatgtgaccttttgacaccttaaatagcctttacccagttgtctttttcgctttctttttcttttgtcctttactgatcatcattaaatatttcaccgggttcttttttggtgcctttcctggactacgttctgtgggggtaaagaagggacattccttctttccttgaatgtatgcttcctgaatgtcagctgccctggtcggtactggtatgatatcacataggttcctgttctcagaatttccagcctggtaaggataaactgaccaaaaaatgggcaaaaaccaaacacataaagaaagtcaggtgatgaaagaaaaccctgtccacagatataatatttataccaaaatttgaagaaagggaaggagccagcgacttgaagaaatggggctggacatctgcgtttagtgtttgcaaaggagctcaggtggcagagagcctggtgtgttccaaggccgaaagggggcctgtgtggtacattctccgaggagagtggcccaaagtgacgtcggcagggactagattgtgctgggttttgtctgtggaaacgagtgaattttctccacgtgtagtggggtggatttataccaggagaaggccatgatctgattggctttaagaaaaccaggctgctttgtgaagaatagagagtaaggggcagaaggagaagcggagagaatacgtaggaagcttctgcaaatgccccggcaagggggactggcagcccagatgaagacagggtggatgacgtggagaaaagtggatgaatgaaagtgtaggttaaaagtagaatccacagggccaaaagagggatttgggatgtagtggagttaagcttcttgcttctgattagagcccttgggggaatcttttacagaaatgatgacaactggattcagatcggatatggggcttgttcagtttgagatgcccgtgaagtatctggtgacaacaattaaccagatgtttgtaaacacacgagtctttagcttaaaggaaagatcagaccggagacagaatattggggacaatttgtatgtaggtgatatttaagaccttggaaatggtgagttcttgcctgcagagagatttcagacacagcaaagaagagaagcaactgctgaggagctctaccatgcagagcagggtagagaaataagacacccatgaaaatatggaaagggacagccagaaagggatggggtagccaggagggcccaataccatggaccaccaagaagagagcttttcacctgattctacataagcagcttgagaaaagcttgagtcaacaggacttgaattccagcactaaataagtaaacaagcaaacacataaataaagtaagagatcaacaaagcatagaaagagaatggggaaataggagggagacagaagtggagagagagagaaagagagagagagatgggagagcctatctttccatatcttttgtcaccttttgagtaaaacctgcccataatgggctcagctccgcagccaggttgaaaaaaggtcctgtttcacgccccaacataaccataaattagaaagccttctggaaaaaaatgtgttgtggacagatgagaaagtttaggatcaaacaaccatagcagcactagctcatgcttcacccaggatgatttctcttcatgttttagtgcttggtctttgtcatcgctgacggaactgcactgttttaccttggaaggttataaatggggaggcatccttagaacttatttatctttgagagcatgaatcttttcttcttcaatctagacttgcccattcattattagatgaggtaaattattatatctgagagatacattatgtcctttggtgatatgtgtatactttaatagtcagggtctgtagtttaatgagtgaagcaattttgagaattacctctgctgagtaatttttggtatttagaaattacttatgtgaagcctgtccgtgttcatggtcatttcaacacctatctctcactctctaaaatcattgagaatccgttattgcctactccagtgatctagataaccatttacctgagctttgttgagttcagtattctagctaaaatcctgtatcacaccaagtactttgaacaactaattgactatacataactttattaacttttttcatatatttttaagtaatggttatatgcagagaaaccatggtttggtttgaatctgctatgtatggattaacattgctggattaaattttagttaaatgtaagaattttgtctatggaaatgcatgcaaaacagtacttgtgctaattaaagttggagagaaaggggacattaacaacctgccgttggcttatctctgatcctctgttgtgagtggaatgtctagttgtgtagtaccccgccttcatctatcacacgctatatgaatttaaataagttgtaaatgccctggatttgatttagtcctttctttgatctagtgatgaaataaggaattgtggctatcattgaatttttgaaaagcatctactgattaaaaattttaaaaactgtttctaaattcttagtgtgaaatgccctcggtttagcattttccattattttgctgtttttaacatcttcaggaatatatatgatttggaaaaatgcagtataaaatggtggctaagaatgtaaactcggaaaccaggctgtctgggttcagaccctggctgtgatacctaatagttgtgtggcctcgggcaagcacctgggcttccgggcaccacactttcctgttgtgtaaagctggtgtagtaataacacctgcctcatagcatggctgagggggttacctgtttaagcacgtgcaactctagagggcttagactactacctgggtgtagtaagaccgttattaccattagtggttctgacaactctcattattattaccacttactcaaatgtttcaaatagaggaagaggcaacggttgtatttttttttttttttttttttttggtgttcccttcaaggaaatcttgcagagaaaattgcattctgtatatctggttactttcatcccatctggaggcacaacaattattttcttaatcctttattcgaacaaaagtccaaattctcaataacaataggtaaaatggaactgatggatcagtgttgaaatgggtcctacgggaaaagttgtaactaagttatgcaggtttgaaaggtatcatcatctgaacatctcacaatactcttcaaaaagacatcctgtctggttacacaaaagatggagcatgagcatttttcacagctcagcactgggagccagggacacatctttgcctagtcccctgtccttgcctgatacattagtcctgaaagtgggaaacccatgactgtagacaactctcctagattctgtttgtcctttgaaaagccccatttagcaaggcagagaaggcagtgaggacccaggctgtcttcctggaggtccagagagaagaagggtgctgacaagggccgctgcggggacgattgggagctcacaggcttgggttcggagaaatggttcctctcttaagagcacaacagcaacaacagatgtttcgggttctttgtcttctaaatgtgtctcacagatgtacagtgtttatatacgtatatacaaattatatacaggttgagcatcccacatctgaaaatctgaaatttcaaatgcttcaaaatctaaagctttttgaacatcaacatgatgctcaaaggaagtgctcattgaagcattttggattcggatttcagactttgggatctgagatgcttaacccagtatgcattatgcagatacttgaaatctgaaaaaatctgaaatacgaagcacttatggttccaagcattttggataaggtatgctcaacctgtaatatgtattatgtatatgcaagtatgcatgcatgcatagatgtgtatgcatatatgtgtgtatgtatcaatcagatagtacacatatttgatctcattttggactttgaaggagtgcataattagattattttgtttccatatttgaaaacaaaatctgttttcaatggtaagcagaaaaattgttgaaacatctgttacagtggcaaaaggctctgactcttgtttaaaatgagtaaaattgtgatacttacttttagagtaagatatataatgataatagtacagtgtcctacatcagagaaatgaacatccatgtttttgttttcaagtgggataattgtaggtggagtgtgtaaaaactgaagcttatttcatgcacacatagtatctgttcccttctggtgtttttaactaaatgaaatatatagggaagtgggattcatgcttgcgatgtatcttctcgacttggggcttgttctcagggccttgcttgtttgcattctgtgatgttgtccgcttagaggtttgttcttcagctgagggacctgaacaacacaatgatgggtaagatgagagagattgctgtttagaccatgtggccagagagggggacagtgtgtgtgacatgcagggtaatcacctcattctggtttgtccaggactgtcccagttttagcactgagagtcccctcagtccctgggcaaaccgagatggctggccaccctacttgtttatagctactgtgggtataaaacttgccacactagaattatgtgttgtccctaccactgtcaaagtctgtacatctaaaaggaagtatggaaagtagaaaactaaatctaagattagctaactatcctgtaaaggctaagcaaggcagaaaggtttcatgaacagaactgaatttcttttcaaagcatttttcttaggaatgtatcattgtcactgtaggaagaagttgatacacttccatggtatgctaggcttataaatttgagaaaaattaaccacaagatatttccgggcccctaacatctcattttgggtacattgtaccttcactctagtttattttccctttgttctttttctggacaacattcaatgcttgttgaaacacacctgttggaattagcccagtgagcatttctcagtttgccactgggagatatttttctttcttcttggtggaatgcttgacaaaaacatacataccttgaagggagtgtaaagcatgaggcaagtcagaggtgtgcggaggagctccgtcactgggagggtcttgaccatggcaaatgttgcaatgaaaaacaccaggctgttaattaccccacaactcagggcaactccagctaaaatgccattgctttgtggcaaagtataacaagaaactcgaatctgtgtactctggtccctgtatgtatattttcttctggaatattacagcctttttcattgtgcttataaatttgagaactagcatccgggcacagtggctcacacctgtaaacccagcactttgggaggccgaggtgggtggatcacttgaggttaggagatcgagatcagcctggccaacatggtgaaaccatgtcttctactaaaaatacaaaaattggccgggcatggtggcgggcatctgtaatcccagctgcttggaaggctgaggcacaagaatcgcttgaacccaggaggcagaggttgcagtgagccgagattgtgccactgcactccagcctgggcaacagagcgagactctgtctcaaaaaaaaaaaaaaaaaattgagaactagcaatagtctgatagagcttttggtctgctttcaaatctgcatgtgttctaataacttggcatctttcttacggctctgagatgaagaaacattgcctccaagaaacagaaactgttactttcatatcttatttgaaaaatggcaatgattttggaggacagtctgtcattttccagaggaacagatgtgacccatatccacagcaggatgattcagaccattataaactttgagtaggctcttctgaataactcagagatccttgagtttacctgaaagtagagaaatgaattaatgatgtaagtctgtaagaaagagtggactctctggctgttgtttttctgaagcctatgaaacctcgtagatgggcccttcctatgtgaagtaggtcccaggtgtgaatgccctctgtgcctcctcaacaggagacccacacatggggaccaccctgtgcacgcagagcagtccactatcatccccacctacagtgatgccttgagccccctctttcactatattttcccgtggcctcacctacaggaacagtttgagcagattctgcaggttgttaacattagagaaaacttgcatgaatctacatatcagttaaaataatgaatagttcttttagtcctgctctagcctctgctgccttatatcacattttgcaattctttgagggtagggattgatttttgttcacctttgcatctcttgtatacaacacaccatagcacaccacacatattgatgttcaagaagtatttgtttggttgaatgaatggagctttgtcttgtgcctgactagttaataaatatttttatgtttgtttccttgtccttctcttttttgcatggggagggagtgccacagcaagaggcaactagaagtagtatttcgtggtgactgcaggacatgtcgtgccattcattgagcattggtgctttctctcacgtggatcctgctgccatctgcagtctttgtttatgctccccttgccctccaaagtctggagacaaaagtgataaagttgattcatgcttggagtatccagcgttccttgtgttgcttttctctctttattaacagatgtagattgacttagtgatgaagatgtttcctcagttggttccatttatgaagggcagggaaactcagaacaccttctaccatcttcccacaatttctcggttggctcacacttcctattccaattagtcagggggttcactctttcttcctgccaccacctttgttctggccattggcataattctgcttagattcctgcaggaaatctcagctgatctccaagtatccagctttgtcctttattcacctcctaatccagttaaccagatgtttctgaaggtggcatatgacacccccaccccactcacctttaaaatccttttagtagtttccgggcctcaagatgaagttcgagcactggtcctcctggccttgtgccgcctgcatctggccttgtctgtcgggcttgtttctccttttcccttcacaaggcagccacgctcagccttgtacactgtcccagctgccccaggtctcttgtcatgggactttgcacatgccgtccccctgcctggaatgccatcaccatgctggattttacttttagcttcagattttatcttacatttcagatctcatcactttctctgagaccatttcccaggctcctgccctcaccctgctgccgacacacagcaggttcagtgtggtttccctggggtctggcgacacctctccctgttgcaggtcttgtctgccgtgtgctgccatggcttgggccttgcttctctgtatatcataagctcctgaggacagacactctgtatctcaggccctaaaatagtgccttgtgcgtcgttggcgattggtatttgtttgaataaattaattgttttatgcctaatattaattttcttttcataattacctgtcaaagtacatttgtgaaaacaaaaaaaatcaaaggagagacatcctttaatgatgtcagtggtgagatcaggtggtccatgccttcctatctcaggtcttgcagggtggaaacgagggataaatgcctgacgtttccccttgtctgcatctgctatccgtcacaagaggtgttggctggtgcagtcacatcacacttttctaaactcagaattgaagtgagttttttatttactttttttttaaggacttgtgtttggtgttttggggtgttcttacggtttgggaaattttatgctaaggacttgttctttccattaagtgctcctagaagaaaaataaatgacaaaagaaataaaaatcccaatgaattgtgacatattgtaatatgtcttgtgcatatctgtgtaccttggcagattattctgacctaactgtagctaattttcatttgagaaatacatgtccatgaagtttatatagtgtgttcaaatgtaattttattataaccatattattataaaaaacacacatttgtatagagaacactgcagcatctacttattccattattacaatggtaacaccatttattttttatgagtcacttgtagaatgacattttggcaataagtcaatgagtttatcatggaaaagtcttcctcccaacctcctcctaccctgaggcttttctattcagagggaatatctttttcaccctcatgcttaagattcaaggatagaattcactctttttgatatatagcttgatgaattttgacaaacatacagtgttgatccactaccacaatcataaaatataaaatagttctatcaccgcccaaattctcccacactccattgtgatcaactcttcctccaccaggagaccctggcagtcacagatctgttttctgtccctatagttttgcattttctaaaatatcttatgaatgggatcctaaagtatttagcctttgaatctggcttgtttcagttctcgtaatgcatctggtactcatctctttgttgcacatatcagtactttgttcttctttattcataagtagtattttattgtgtgcatgtaccacagcttgttattctattccccagttgaagggcatttgggattgttccagttttggccatttgcaaataaagatgctagaaacattcacaaatatgtttgcacatgaacataagcctttattttgcccagttacatgcttggagtagactttctggtaagtgtatgtttatttaactttataagaaacttataagaaacctcaaagtcctcagggaaataatcagaaacttagcttgctatacctaacaaaactatcatttgaggtaggggacagagggataatggcagttttagacatgcaagccattctcattatgttttactgcttaataagctgccctgaaacccatcttagaacaaaataatcaggtgttttgtacacaaatctgcaatttgagcaggagtgggaaggcttatctttgctccacctggtgtcagctagggtggttccactgatggcagtagattcctcttccaacacgactcactttcatggcaaaagttggtattgactgttaactgagagttcatcagagttaatgaccagagaccccagttcctttctacatggacctctccatgggcatggacttccttcaaagattatatgctgggttccaaggacaaacatacagagagaagctgtcacataaaaactatattgccttgggcctggtgcagtggctcacgcttgtgatctcagcactttgggaggccgaggcaggcagatcacatggtcaagagttcgagaccagcctgggcaagagaccagcctggccaatatggtgaaaccccatctctactaaaaatacaaaaattagccgagtgtggtggtgtgcacctgtaatcccacctactcgggaggctgaggcaggagaatcacttgaacctgggaggcggagtttgcagtgagccaagatggcgccattgcactccagcctgagtgatagagtgaaattcctactcaaacaaaacaaaacaaaatactatattgccttttatgatgagccttgggagtcacaaagtgtccattttcaccattgtgtcactagctgaaagagtcacaaaggcctgcccaggttcaggagaaggagccatagacctgtccctgtgtgacgtcatgggaggctctggcagagcatgtctggtaaggaatgttgctgtgccccatttgaaaaggacaattggccacataagggctcaagaagtttaccacttaccaaagctctttgagagaatctaaaaaggacacattccagggagaaaagtaaatctgagaagaagtagaatattaggagtgataatgaacaaataaggtggtaaaacatattggttagtgtaaatgaatgttgaatattttgaaaagcaaagaaatgtggaattgaaatcccaaattataagagcatggaaagcagtgtaggagcagaggggattaaaaacctgttaaagttactgctttgtctcataaacagatacagaaacagattaactacagaccttgttgcagaatttttatatttggaacatgttcaggttttacagcaccttcttacccccttttcattgaactcttgaagatctacttctgctcccaccaaaacagaatcatctttgagttcttactctccttgaacttcgctggtattgactgttcggtttacttccaccttctttaaccactctcttcttttgaattcaataacacaacacactcctgctcattttttctggctctcttcttcttagacctctttgccaacttgccttcctccacctgtctttaaaccttggatttcctcaatccttggtcctagcacttcactacctcccaccttattctccctccttaggtaagttcatccaagctcatcagctcacataccaactatagcacttgcagatgactcacaattttacatctccagcccacatcactcctttgagtttcaaacctatgtattcaacagcctattcattgtattttcctggagttttttcaaaggtgcttcatactcagtaggttgaaaacagaactcttttttcttcattgaccctattttccctgccttactcctggctctcctttcttaacataaatgacactgccatccaacagttgcccaagcaagaaccaaggaattatccttgatacttctttttctcttccaccacatccagtcaatcaccagtttctcttattgtaccacatgttatcccacaaatctactcacatcattgtgtgtccacctctgccaccattcctgaccaaactcttgcctctttcattggtctctaccttgtttccctatgtttattttgtcttctctctccattccccatgctgtggtcagaatgatatattaatatgaacctgatcttgttactctgttccttcaaatccattagtatattagtctgagtaaccaaatccttaatataaacagcagggtttgtgtaattcagttccttcccttatctacctaaattttttcttccatctctttccctctgacgtccagccacagccactttggtatattggttacgttcttagtttcccggatcagatacctgagtttgaatcttaacttttcacttactaggtatgatcttagacaagttcttaaacaaaacaaaacttttattaatggacaagttcttgaacctatgcatcagtgttctcatctctgaaatgcagttattagtctcagcttcttaggggatttgtgtgaattaaatgagatgaaacgtgtgcggtggtagcacagtgactgacagttaataagcccccagtaaatgttagattatttgcttaacgaaccacctcccttcttgtctctgggaattctcgttgctctccccacttatacaggatacccacccgcttgcttcccttgcttagtactgacttatccttctgcagcaaaggaccttacatcccagctggctcaggacagacccagtttatgtctgttgtagatcagttaacatttactgtttttaggtatccccttttactactggtttgtgaaataaattagatgatcacccttttgtgctcagttcaagagtaaccttttttaggaaaccttctttgattcctacaaggacaggtcgtctattatttgttcttacagcacatcctgtaacttttttttgccatagttaccacgattacagttaaaacagttcattgcataactagttccttgaggtttgtttctcctattgggctctaggcccttggaggactgggacctcaaggcggggggtgtcttgccttacccctgagttttcagcattggtcttatccaagtcattactcagtatatttagaggagacaagaaacactgaacaggatctggtttggacttcgtgtctgtttctgactttaaatgtcaagtcacttcctctcactgtctcttcatttcttcatcttgtaaattcagaaaattaagcttaatgttctctagaattccatcggcctctacattgtgtgagtctagcccatcagggacattttttaaaccaatttttaaatatttatagtcacaaatttaagaaggaaatggaatcaatgtacatctccccaaagacagagtaaaatactttgttgctcattgaatgaagctctggtcattaccctttttgttattatgattcctaatttgtaagctctgatgttatcccttctttctcaatatagctgagacaaatgtgtagtctgtatgatcatatcattgctgttatacctatttacaagtttaagactgagtcaatagaaaaaaatccaagtgaagagtgtttaaaataaacttgtgtttctccaggaagttaactaatcaaacacttttcattgtagatgttgtcattcagtacaaaataatccctgagacagtctcatgaaaaacctaatgcattttttggtgagttttataatgagattaaaaagaaattaagagcaggaagtgaaattataacgccagtgggaaatctttgaaaccattttatagttttttccttcttatgtaatatgtctgtgagattgggcaggtttttgtttgcttgcttgcttattgtttgtgtttataatgtggaggaatcagctgaacttgacttatccctttacaactgatccatgcctacacagtagttgcttggagctaaaagcaggaacacatggaccctgaggcatagctgctctgaagtcctggcggcctctgggagggcttatccatgatatgggacacagggtctcctgaggtcttggaggagttttcctggtaactctgaggagtggcgggtcatggtgtggtgaccattggtctaacctgaaggactataggaatgagggcagggagaattgtagggaggcagccgatgctgctggtgagaatgaaaacatcctcagagtggcttccatacccatcctgtttctgtagtgcccagttattgtgaatacccatcacacgttattctatcacagcaagcagctcatctaccctactgcacccccaagttcttgaagtgtctctctgtttcttgccgttactggaggtaagccaacatgaaagatgaaagctgtgtttatacttctactgcaaactcttgaggaaaaaaacagaggcattagccaaaagagataggacatacaggcaaagaagaaagatgagctggaaaccagtacctaaataagtccaaaagcaatctatttatagatcccagagtgagatcgataaaggagatgatgtggagaaatatatatatataatatatatatttatataatataatatataataatatatattaaatatatattaaataaatattaaatttatatataaatttgttattaaataaaatttatattaaataaaaattaaatttatattaaataaaaatgtaatatatatttttataatatataattttatatatatatatatatatatatatatatatatataaaaaatacagaaagctctaagtatgcacagatcacacttttgccaaaataggcacctacaatgagggccccatccccacccttgagggtttggagtgatctttgggtaaaagctctattctaactcttgaaatggttaaactttttctagatgcatcttttaatattacttcctcttttattccttttttctattttttttaaataagcatctttgctttacttcttttagctatgaagcagctcttgctgatagtaaataaatacttaaagtatgaagatacttccttgtagcatttgaccaatttgtaaggcagcggttcctcaatttcagtgatgcaccaagcttttccgaaaatgagttccaaagggaattgatttttatctgcaatactctcatcctacagacaggatattgactacacttgatagaatggaagtgtaaatccagaatgaagcattgcaggaacaaatcccatgggggcggttcatgatcaacagaatcattcattggacggaaagatcggagagctagacagtgtcaatagagacaaaaggggaaataaaagcattcatttcctgaaagagtcttttcctggaaggtttttgttgactggctcttccttttagtatactctctattcctagttgtttatcagcttatgtgagaaccttaaaactcataatcatttataatcaatgtttaaacatggaaaaataaaagtacataccataggccccgccggcctgttattacatgagtttattaacattcactgtgagatgccttggtatagacttacccctttttatttctgtctcatgttgttttggatattctgctttgctaatgcattaggtagtttcgtcttgctctgcaaagacaaaagctcagtcattgacctggagggcccaaaactgcgccccctgctgccttgtgtatttggtggctggcatagtcagttcattatgtggcaggcaaaagtttgcattccaagggcggaagacatacacattggttttgtttgagaattatatcataaaactgagttctaagtacttcttgaacattgagattattattgatgaactgattataaagtattcttaaatataaacccaaagcaaattttattaaaaataaatagaaatttgattaagaataagagataatttctaataactttttggtaggtgacagcagggagatttgtttgatcatggagtttttaaatgcttttaagtcttgaagtccattaaggcatagaagagagaataggagaaaaaaacatctctgaatggcacagaccgatcacatgttgattgaagcacagtcaatgtgtatactgaaattgtgagtcaagagctatatcactaaaagataagggaaagacagcatcagaaattgactacaacaacgaaggtgtagtgggagataaagttagacgacatgagattcagtgttacagatggaggcaatttgagaagaggcgggtggagtgtagtgagcatggtaatgagaaggaaggagggcatctaccccacgtccaagtccaaagcagggtgggagagacctagagagggctgctagggcatgagtgtcagcaggggaggaccagccttcctgttgagcaagaagaagaaacatttagaggagagggtgacaatacaggggcctttgctgaggctggtctttgagtcacagaaagcacaatggaagtggttaaggagttttggtttggtgagggatgtagtgtggagtaagagctgttcatggctgtttggggattcatatacaggagatgagggatgaattgagattctaagactttattccataaatacggacaaagggcagtgatgtgttgttcagtgtttgataactataactggctcttggcagggaagagccctgatgtgtagctttttccaattttcatggtgtgaatactcccaccacagtgtattccaggtgaccaacatgacgtctttctataaggagttggacagagatccacaagattggctctgtgttcagcacgcattgggtaaagggcatggctggattaatgctggtagactcaagccaatcattaggcaaggctgtgagtggtagggagtagagggcatttggtatccttcctgacccctgtggatagaagcatagtgacctgaggaacaatagtcttcttggtgtgtgggccatataaaaacaagcctgcatcaaattctgtacatgggttagagtttgctagccacggctgtaaaccttctcatgcccgtgagccatctccacgtgtgaatctaacagatatctccaatgttgatctccctccatgccccaaacctgctccacccatagtctatatcatatcatttcatggcagctttatctttcaaatggttcaggccaaaaccttgatctttcacccatagccacagaaaaacctgttagctttcctttcaaaagctattcaaaatccaacatttagctgttttcactgctaccactttggaccaagtgatggtcgtctacagctggaattattataacagcttctggtctgtggtctagtcttcttgcttgcttgtattcaacacttagctaatctttttttagaatgtaagttagatcatgtcagtcttcaaaatcagaaatttccagtttcctgtttcattcacattaaatgctggagtacttaaagtggcctacaaaagtctacataatatgctccccattacctttcttcctccccctactcctttttgtttgtttgtttgtttgtttgtttgtaaagagatgaggtcttgttctgtcacccaggctggagtatagtagcatggtcatagctcactgcggcctggaactcccggtctcaagccatccacttacctcagccactacaggcatttttgtagaaactgagtctcactgtattgcccaggctggttatgaattcctggcctcaagtgatcctcccaccttggcctcccaaagttctggaattacaggtatgccatgccccgtatgtcttcttttgagaagtatctgttcatgccctttgcctactttttaattgggttgttttttgcttgctgatttatctaacttccttttatacgttccttatatgttctgaatattagacatttgttgaatgcatagttcctgaatattttctcccattctgtaggttgtctgtttgctctattgagtttctttttttgtggcactatcacggctgactgcagccacaaactcccaggctcaagcgattcttccacctcagcctcccaagtagctgggactacaggtgcatgccatcacacctggctaaattttgtatttttttgtggagacggggtctcactatgttgccacctggctaaattttgtatttttttgtggagacggggtctcactatgttgcccagactggtctcaaactcctgggctcaagttatactcctgccttgtcctccgaaagtgctggaattacacgtaccacacctggcctcttctagtactttttttttttttttttttttgagacggagtcttgctctgtcgcccaggctggagtgcagtggcgcagtctcagctcagtgcaagctccacctcccaggttcacaccattctcctgcctcagcttcccaagtagctgggactacaggcgcctgccaccacgcccagctaattttttatattgttagtagagacggggtttcaccctgttagccgggatggtctcaatctcctgaccttgtgatctgcccaccttggcctcccaaagtgctgggattacaggcgtgagccaccacgccttgccctcttctaatattttttaagcttgaggtcttatatttaagtctttaaaccatcttgagtaaatttttgtatatgatgatagaaaggagttcaattttattcttctgcatatggatatcccattatcctagcaacatttattgaatagggaatctttactccattgcttatttttgttgactttgttgatcagatggttgtaggtgtgtggctttatttctgggttctgctccattggtctgtgtgtctacttttgtattcataccatgctattttagtttcttaggccttgtagtatagtttgaagttgggtaatgtgatgcttcaactttgttctttttgcttctctaacctcatcttttacctacttctgttccctggacataccaaggattcctgcacctcttggcctctgggatgtttgtttcttatgacttcttcaagaaatctgggtggctaattttgtacttttttcaaatatccttttcttagtgaagacttttctggccaccctacttaaacccttggaatttccaactctcccacagggattctgctctgtgtgcgaaggggtatgtgtgtatgtgtgtgtgtgtgcatgtaggtgtgtacactatttttatttaacatacgataagcatctttggccctggattcttcttttttagatgttaatattgttgtattagtctgttctaacactgctagtaaagacatacccaagactgggtaatttataaaggaaagagttttaatggactcacagttccacatggctggggaggcctcacaatcatggctgaaggtgaatgaggagcaaagtcaggtcttacatgctggcagacaagagagcttgtgcaagggaattcccatttataaaagcatcagatctcgtgagacttattcactaccacaagaatggtatgggggaaaccacccccgtgattcaattatctccacctggccctgcccttgacacatggggattattaaaattcaaggtgagatttgggtagggacacagccaaaccatatcaattgttaaatgtaaagacagtgtttatgaattgaaagattcaatatgtgaatatatattttatatcttaatgtgatcttaagacttactatgttgctgtggtaaacaagacagtgtggtattagtggagggatagacacatagttcagtggatggagtagagaacccagaaatatattcacacatggataaccagctgattttttgacaagggtacaaaactccatagaatctgatcagaggctgatgtccagaatgtgtaaagaacccctacaactcaacaacaacagaacaaacaaagtatttccccagagaagatatacaaaaggtcagtaggctcatgaagagatgttcagtgtcattagtcattagtggtcaaaccacagcaggtcatgacattaacaggtcaaaaccacaattagacacaacttcacaccccttgtaacagctaatataaaaagtagaaaattaacaagtgttggtgaggatgtggaaacagtggggtccttgtgcattgctggtggaaatgtaaaatggtttagccaccgtggaagaccgttggttgctcagaaagttaaaaatacaattaacagcaatttcacatctaggtatataccccaaataattgaaagcagagacctaaacagaccttgtacaccaatgtttatagcagcattattcacaacagcaaaaatgtagaaataatctaagtgtccatcagcagatgaatggattaacaaaatatggtctgtaggtaccatggactattatgtgcccataaaaggcaggagctttgaaaaatgctgcatcacgtggacgaactttgaaaactaatcattcactatgctaagtgaaacaagccagacataaaagaacacccattgtgtggtttcacttacatgaggtctctagaatacgcaaattcataaagtcggaaagtagaatagaagtcatcatggccctggggggagggagagatgggagttactgtgtcacaggtacagagtttctgtttgggatgaagaaaaagttctggatagaaatagtggtgatatgcacaacactgtgaatgtacttaacactatgaaattgtagactttaaaatcattaaaatgatagatttcaggcatattttaccacagttttttaaaaagcaattcaggggaggaaaggtgatcttttcaacaaatggtgctggagcaattgggtatcaacaggcaaaataatgaacctgacctaaacctcacattttatatctttaaaaaaacttaaatgaacaacaacaacaaaatgacaaaacatacgagagatttaaatgtaaaatgtaaggttataaaactttttggaaaacacaggaggaaatcttcagagcctacggattagtgaacaatttttagctatggcaccaaaaacatgatcaatacatgaaaacaaaataaattgaatttgatcaaaagtgaaaacttgctctgggacagatgctgcaaagaggaatgaaaaaacaggctgcaaactaggggaaaatatttgccagccacatgtctttcaaaggacttttatctgaaatctgtgaagaactcctaaaattcaatagtaaaaattcctattagaaaatgggcaaaggaggccaggtgcggtggctcatgcctgtaatcccagcactttgggaggccgaggcgggtggatcacgaggtcgggagatcgagaccatcctggctaacatggtgaaaccccgtctctactaaaaatacaaaaaaattagccgggcgcggtggcgggcgcctgtagtcccaggtactcgggaggctgaggcaggagaatggcgtgaacccgggaggtggagcttgcagtgagccgagatcgtgccactgcactccagcctgggcgacagagcgagactccatctcaaaaaagaaaagaaaatgggcaaaggagattaatagacatttcatggaagaggatatacagatgtcaaacaggtatatgaaaatacctttgccatcattggccattaggaaagcgcactttcaaaccacaatgagatttcacttcctacctatcagaatagctaaaataaagagacagtaacaacatcaaatacgtcgagatgtaaagaaatgggatcagtcctgtattgctagctgctgtgtaaactggcatatagccactctgagaaacagtgtggcagtttgtctaaaaacaaaacatacgcttaccatatgaccctatcggtcacacttcttagcatttatccacagaaatgaagacctgtattgacacaaaaatgcacacgcaaatgttcacagaggctttatttgtaatagtcaaattttagagatttatttgagattagtaaaaaaatcagaaaccactcagatgttcctcagtgggtgaaagagtaaacaagccgtggtgcatccgcagcatggaatcctttgcggcaataaaaggaatgaatgaatgaatgaaccaggcaacgacttggctggatctcaggggcatcatgcttagggaaaaacccaatctccaatctcaaaaggctttagactgtgtgagtccatttatattgcattctcaaaatgactcaattacggagatggagaaaatattaatggtcgcagggagttagagacgtaggagagcttgagaggggaggtgaggggagacggctggatgtgaatttaggtggacagcacaggggatctttgtcgtggtaggacagtctgtgtgttgattgtagtgatggttgtataaatgcgcacgtgataaaactgcataaaactatatgattgtgcacacacaaatgagtacatggaaaaatgatgaaatctaagtgaggtctgggtgttgttccaatgactatgcaggttttgatattgtaccatagttacataaggttttactttgggggaaattagatgaagagtacataagacctttctgtacaattttggtatcttcttatgaattattatttaaaatctagtgattttaaaatacaggtttgcatcttttaattattgtcaagtaactatttgcatatgaatgtcaagaaatggaacctgtggcatctgagaatccctaggtttgttgtctccagatgcaactcctcttcctcttaaaggcaacagctatcctgacttatgcgttagccactttgtatttcttattatttatttatttatttatttatgtattttttgagatggagtctcgctctgttgccaggctggagttcagtgatgctatcttggctcactgcaacctccacctcccgggttcaagcgattctcctgcctcagcctccggagtagctgggactacaggtgcaccccatcaggtccagctaattttgtgtattttttagtagagatggggtttcgccatgttggccaggatgatctcgatctcctgaccttgtgatccactgcctcagcctcccagagtgctgggattacaggcgtgagccaccgcgcccggctgccactttgtatttctttatagtttcaccatctgagtatgcccccgagtgctatagtttagttttttgactttatgtaaatgaaatctgactgtgtgaatccttgtgtttctaacttctttgaacatagtttttgtagcattcgtatttgttctggaaagcattcgttttcattgctgtttaagattccattgtgtgtacaccccagtgagttcattcattttaatgttagacttttcctgatgagatgattataaactgctgctctgacctttcctgtacacatccctggtgtacttgtggacatctttctgttgagttttacctcagaatggaattactgggtcataaaggtaggcaagtcttcaaatttatttttcaaaatgccaatttttcaaaatgattttcttaactgtccatttctttcaataacacttaatgtcttttgacatatcatacttacttacagtgtatattatgtgtctcccatcactaaaatataagctccaaagatcatgtgctttttttttatatttttatcccaagtatctagaacagaacatgggacatagtaggcacataataattacttgttgaatgaatacattgaatctatgaatgctgcagccaaaagatagctttctatttattgattaactttcctttcacatgaattggattagaacaaacagaggtataacatttttttccgaacctcttgggaccagatatgttttagaattctgagtttttatttttcatattttggaaagattatacagtccctatactgtatgtagcccagtatcacaagaatggtctctgagagcataacataatcaaatgttttaatgttctgcagtgaaaagtaaatgggagaagaacagactctaaacagccttatatcagttaaagtagttgtttagttggtagaattttgaagtatctgcctgtcagacgaccagtgaagattatgatgctaaaaattacacatcagcatttacaaaaatggtttacctctctctaccactctgtgagatgataggcaacccaggtattattatacccatttcacagatgatattatggaggcaccagaaaatgggactctcaccccatggcttactaaacagcagagctgacacacaaatcttgtctttcgattctgtccagtgcttttcaactatgccacagttgcttcttattgaggaaagcagcaatttttgagatttgtaaattaacatttccagaggggaagaaaactcctctataatgaagctgtcacaaatcatgcactgtcgtcctggtatctggaacaaagctaatggcagcgttcccacggaggcgctcgtatgcactgaactgtccagggtcagaactcacgtgtctgctgcagagacagtgctgagcccccatgcatggggcagtgagccttcagcacggctggcctctccttcctgtgttcttcctttcttgagaatttttttctttttacatcagcttcatagagctgcctgttatactccaacctgctctcctctctcagaaggggggatctcaaatcaagcgtttggatttacagttttttttttttttaaacagagttttgctttgtcactcgatctgatggagttttgcactgccagatcatgcagtggcgcaatctcagctcactgcaacccccacttcccaggttcaagtgattctcctgcctcagcctcctgagtagctgggactacaggggcctgccaccatgctaatttttgtacttttagtagagacggggtttcaccatgttgtccaggctggtctggaactcctgacctcaagtgatccacctgtctcagcctcccaaagtgttgtgatcacaagtatgagctaccacgcgcggcctggatttataaattcaatagcaaatatttctgagagtgattttcaggcacagtattaccgagcaaggcatttacgctgagtggattgattgggagtgaatgtagtgtgtgcagtcttctttcatatgatatttcttgctttttcgtctgtcttttccacaggtaagctacatgagtgtatagctttgtatctgtggtgttttctgatgcttccccaatgttgataacaggacccagcacatactatgcacttgccaaatacttgcttaataaatgaataattatttaagccttttatctttaaaagataatgcctttcagctctgttaacaaaactggtttagacaataggaagcagacagggagatttttgaggcgagtaggtagttttaaacatgccctgtgagaatactcatcagaggttattataatgatttttatgtaatcttctgttaagattttgttcacttcatgaggacaagaaactcacatatacctggtgcatagtaggtgttcagaaactatttactgagctcacgttccatccaggtggagcagccccgttcctcccaggtcctccacctcacagctaacattccctgcgcctaacatggcaagcgtggaagactctggagggtgaaaggagaggcagctgcctggggaccttgggacttgaggcatgaggtgctggtggttctctgagtttccttgttgccttgttgccttagacacatgcattacacggcacatgtcctaacaaggagctgtaaaaacctctaatctggaactagcaatggacacagacacaaaatgctccaagaacagtcctgtttcctccaggcatagggctgggcaaattgtggcctagtaacaaaaaatgtgttggccactcctgtcccaatgcagccacacaggaatgagaaaagcacccccttcatcacctggccctccagctggtttcagcgggcagaatgaaaggtaatgtgcatctccaccgctgctccactcaagcgttcaggtgctcaagttccgctgtggggtggtggtggcaggcctcagtaggagctgatcctccattccctgctcagcagtgacaggtggtacactgatccctgcaacccgtgcagtctcagcaggtctagcgtggagctaagcctctaccccaactcagcatcaggtacttaaggagggtgagagaagctgtgcaagttaactattaagcatcaccccacacaccctttcagtcaggcacagggaggaactgaccttcagtcccaagctgcagctacaaagcaatgggagtcagcctcccctcccccttcctggtggttgtaaagtgcatactgaagctcacccctcactgagaagcagcaaggggagaggagtcagtgcttcccttttgccatgatagtgttggagaagcccagcataaagctgaacacacatacccagccggcctttatgctccacatccacaatgggtaagcccactaaaaagagatgcataggatgcaaaggtcttattatatcatacccaaaatatgtgggatatacctgaagaccatttatcatacttagaaccagcagaatcacaacttgaatgagaaaagccaattatcagatgctaaatcagagatgaatgtgatgttggaataatctggaaaatattttaaagcagctagtcataaaagtgcttcggtaagtaattttgaattctcttgaaataaatgaaaaaaaaaaatagaaaatcttagcacagaaataaaagagccaatggaaagcagagaactgaaaaatagaataaccaaaataaaatactcattagatgggctcaatagtagaatagagatgacacagaggaccgaatccatgaacttgaggacaggtcaagaatgtagccaatctgaacaactaagaaaaaatagattggacacaacaacaatggacccaaagggacctgtgggacaagactgagaggtaacattggtatcatcagaattcataaggagatgagaaagaaggttgggctgaaaatgtttgaagaagtaatgtttgacagcatctccgatttggtaaaaagcctaaacctataaattcgggaagctgagtgaacctcaaataggataaatgcaaataaatttataccaagacacatcataaataaacttgtgaacattaagttaaaaaaaaaaagagagaaatgagggaatacttataagggcaggtgaaaatgacagcagtcattcgaaactatggaggctgggaggaagtagcaaatttttcaatcaccaaaagaaaagaactgtgtacagcaaattttgcatctggtaaaaacatccttcaaaaatgaaaggaaaatcaagatgttcctaaatgacagaaaggtaggaaaagatgttagcaaacctgtcctattggggaagagctgcataaaatattctaaacagaaataatagaataaaaacccggactttagaaagaaaagaatgttggagcgcagaaaaataggggcaaatataatacacaatcaaacttctgttgaggttcatatgtgatggttgatgcaaaaattgtaactttatgtgctactcagtgaatgtagaagaaatatgtaaaacaattacattttagaagtagaaaaggaaaggaacctaaatggaagtaaggtttctacacttcaaagtatcatatatgtacattgtgatacccatataaccactaagaaaactatccaaaatgagatacagaaaaacgttagaaataaatcacaacggacttctaaaaaatactcaacctataggaagataagaaaagagagaataataagaatataggaaaataataaaatggcacgtttaacatgcatatcaataattatgttaaatgtaacagatctaaatataccaattaaaatacctagatttatagaatgaatgaaaaaaatgacctaataatatactgtctacaagaagctcacttaaagtgcaatgacataagaggacagaaagtaaaagactagaaaatgacatatgaggcaaacttttttttattttattttttgagatggagttttgctcttgttgcccatgctggagcacagtggcatggtctcggcccactgcaacctctacctcctgggttcaagtgattctcctgcctcagcctcccgagtagctgggattacaggcatctgccaccattcccagcttatttttgtatttttagtagagacggggtttcaccatgttggtcaggctggtcttgaactcctgacctcgggtgatccacctgccttggcctgccaaactgctgggattacagccataagccaccatgcctggccaaggcaaacgttacttttttaaaaatgcaggagcgtctgtattaacatcagacagagcatatttgtattaggtgtccagggctgcagtaagaaagtatactcatgggctgtacaaggacacatatgcctgtcactcacgcatacatacattgccagtgataatgtaaaacaggacagtcaatgtgggaaagaatttggcagtttttcataaatctaaatatgcaggtactatatgctgtgttctaaaattgaaagattggttgggtgacaggacacagcgcactgaccctgagttagaaagaagctacgactctgttgctgacagctctgaaggagaaggccaggccaccagcaggaccacatgggatcaggtaatggcaggcaggagctgcaggggacgaggtcagcttatgtatggaaagcatttagttaattttctcaggatccctgtggattggagagttggaataatttcagtaggttccagggcactggggcagtcccttgttgtctggtgcctggccctggagcaactggggtaggcaggtagtggccctggagtgtgagtgcccagtaagggaagtggttgggatgggaacttcaacttgatctgcagctcaagaagggagatctgagtggcttctagccagaatctccaaactgggttgggatagcatcaaaacacacacacacacacacacacacacacacacacacacacacaccaccctgtatcacatgggcattgtttccaagacaaatgaaaaattatgttcacacaaaagtctgtacacaaatgttctttttttttttttgagatagagtctctctctgtcgccaggctggaatgcagtggtgcgatctcagctcagcctcccaaggagctgggactacaggcacacgtcaccacacccagctaatttttgtatttttaggagagatggggtttcactatgttggccaggatagtctccatctcttgacctcatgatccacccgcctcagcctcccaaagtgctgggattacaggcgtgagccaccccgcccagccccatagcatttttattcataatcaccccaaactgaaaacatcccaaatgtccctcagctggtaacagatatcgaaccgcagtccatctgtaatgtgggacgctgcttcgcactgaaaaggtgtgaactgtcgatgcacacggcaacttggatgcatctccaagaaatggcggtgatgaaaaaaattcagtcccaagagatcgcatatggtacggctccatttatatggcattgtgggaatgacagaattatcagagtggagaacagactagaagtctacacgggtcagcaaagcagcggagagaggatagagctggatgcgatcatcagaaagtaacacaagaggtccttgcggtgatggaaacgctgtgtgtcttgactgtgttaatgtcgtatcctgctcacagtgctgttctatacttccgtaagctgtcgtcattgcaggaacctggataaaggtacccaggattgctgtatttttcttacagctgcatgtgaatctgtgttatctcaagagcttagagtaagggaatgagaggagaaacatggcaccctcaaagattattagagaaggttctatttccaaagattagaggatttccaagaggaaactactctggaaaggatttttaattgcatttagggaagccagtgtactaagagctgagacaatcagtgctcagtgtagtaatgatacagctacttcctaactcctttctgggtgctataaagacaaagttaattgtatcattactatttcaaaacaactgaggcttttaaagtgtttcttaggagtgttacaagcctgtctgaagtcctggagagcaatgaagtgtagatccaggaggctgcagtcaatgcagtgtggtggttgagagaccaggccctgaaatcagacctgggtcaaatttcggctctaccagtttctggtcttacgccctttggcaagttagttaatcttttgaggtttaattcttacatgtagtatgagaactgagaagtaataactgtatctatactgaaggagtgttataaagaataaatgagataattaacacaaagcacttcataaatgctctacaaatgccagctttgctgccgttgttagtattataattagaagcaggagcagtagtggtgcagaggaatccagagacaaatttcgtctttgtttctaacagcatgatttctagaaagtcacttagctttgcagacctcagtttcctcatctagagttttagtatgttggagtagatagtatgtaaagtatcttccagtgtttatcttcttggatgctacagtgaactttttagagggaaaatactacagcggctgaaagcacaggctgaggagtctttcaggcctcagtttggatcctgcctccattctgaggcacacaccgctcatggccaatccatgtcctgtgtcctctgccttccttagagtttgccattttgttcagaacagcactgtgagctccctcccacctccccgaccctatgatgaatcatgattgctctaggacaggtcagcagactactgcccaaggggccaatccatccatgttcccaccttctgctatacttgcgttcctgtaaataaagttttattgtaacacagccacccattcatttatgtgtcacttgtggtggtttttccagttctacatgtggagttgagtagttgtgacagggatggaccatatggcctgcaaaccctaactgtttgctatctggccctttacagaaaatgcttgccaccctctttcctaagaacgttatgataaccctgcttctgtcaggtttccagcttcccttgcagctatggggacctgatgattcacctctcccacaaagatgtcagcccgagccattggagcctgctattctccctcctccctgttcctgttggattgtgtgcagttgtttctaagtctagtgcttataggtgtagctaccatcctgccgttataagacagtaaacctggtacaagctaagcagggtggaacagagagagggaggggcctgcattcttgacagacattatcaagttcttgtactggctctggattccctacgtgtagtattttttgttatatgagaaaataatctcttgttttttaaaaaggacttttaaaattatttgttgtggctgcctgtaactaaatgccatccacctattacagactttttactactggtgaaattttgaacaaattatttaattttactaggcctcagatttcctctctgtttcttactttagtaatgaggattaggttagatgaaaaatataaggcttttgctccgttcctactacagaggaagcaaataattggaagttattatttttatttcccaatgaatccattcataattctaaattattttgagtctgtgtctacacaggcccatatctgccaaattaccttttgcaaaaaaccatgttttatttagaaatgctttgacagccagaacatgtgtgtctattgcaaacaaaaatattttcagtttagaaatacttgttttgatcatccgtgtggaaatgaatgttttgtatttgagttgttaagctacaaaatatatttgctaaatgtttttgcaaaaatattcatccatttcttagaataatgccttagagaagcacccagtggtaattatgttcttaggcatgtttatgacacagaacagatcgaaccttttggaaaaatctggaatggaagctgggactaatagcccagtgactctagatgcagggcgtcacctacctcatcacgacgctaatgtttccagggcttgctagttgaatttccacatgacgattagcacaaatccagaactaaatgacaggttatacttctgtctcaagcatcatatgatattgatttttttttactgtaactagaaatttttttcctggagggtcatgagaaaaattgtattttttgacaaaagtataataatttacttgagacttattgttaatgttcagtgatagtggcagggatttatccttttataatccttacattgtttctctttcaaatttttcgtgtagggattataaaaataaacccactggatagcttgtaccttttgctggcatttaggataaagagaaacccaataaatcttgcgtcgagtggcctcactgatattgattgaattataagatcatagtatagcttttacagataagtcaccaggaagacatcacacaatgttgtttatagaaagtaagaaagcaggtcttcttttgtaagattccatattaatcttaacccccgtaacattatactgatatatttttcaagttgattataactctctactacaaggtcaaaataaaccttatattaataaaaaccatatgacttgtctttagacatccaagaaaatttaaaagtaatactttgcgtgtatataagaactttcataatagacagtctcaaaacacttcagaaataaaatacactcatattatagcctggatgtctataggcattcactgggctaatgtttccttccaggactctgtgaccttctagaattactcaaagacagtgtgtttgccctcactggttgattttgtccttcaaagaaaattatttggaagaaaaaattttcaacttattagagaaaaatactcatttctcattttcttatcatttgacaggaagcttaccaatttattgtagataattacaccaatgtttcattccttagaatcacctttcaacatgaattcaaatgtatacgaaaagcaatagagaattctggactttagatttgcaagaaataaaaaggctccaattttcttaagttgttatgattaccacagagtaaaaaatgccatagaatgaaaatgtcttatgttgataggaagaggtcagggctcttactcgaagtacaagataaatcacaggcttaattttggatcacagtggacccctccctccacttcagctgtggaaatacaaagaaaagagttgcattgaagaaacaactggagtccaagtagcactttgcttccgttacaggacttggagcatgttataaatggctcaaaaagtaggatactctctccccttttcagggatctgtataaggaggcagtcatattcaaaatacaaagtagaagataaatgttttctgccggcatgatattttaaaaggaaaaatatgattatctaccatgatgcattgtgaactgatattattgatttttcctcttgtgaccttggttgcacagcaccaacacaaacacacaccccttgctggaaggtctagtttcaggtgtgaatgcgtagaagtcagagatttaaaaaatagggggcttgtagtatttgtttttgccttaattaagagttaatacttggcttatctacttactcattcagacagcgtgggttgaaaatgtattataaggcaggtaatgtgaggcaatgggggtgtctttaagaaggtaatagcttatctgagccttttatcctgcaggattcactatgaccttgcttttccactcccctcccgctgggtctttcagtctgtccccctttatttttgcttactcattcatgagtattcattaaactcctacaatgtaccaggcactcagaatatagctgtgagcaagacggttatgcttcctactctcatttagcttataattgagttggaagacagacattaagtaaatacttatattaataattttattgtaattatgatttctgttcagagacccaacataatttcaagtttccattttttcttaaaaaattctttctgattctaaaactttatagacaactaagaaaaaaataggaataaatcaggaaaaagtaacctaagatatcccaccagcccaaaataacttgttactatttaaaatgctttttcttgcacttttctttagtgtgtatatgtgtgtgtctgtgtgtgtgcacctgtgcccatgtgtatttagaatttgggatcatactatatagttagttttgctattctctttaaatgatcattaaacagagaggatttcttatattacatatttttcaataacatattttaagcttgttgaataatttgtattttagttatgtagcataaattatttgtttatttgggtacatttcagttatgtccttcaatttttgtgcttatttaaactgatgtgataaaaatataaactcttggctacatgttttatttagtctactagataatctagaattggaattacttggtcaaagggtataaatatttttgaggtgattcatatattttatgaaacattatagaatatttatactctttgatctattcaatgtaatatacaatatgaaacattcccctgtattctagaatcgcatcgatttatacatgccttcaagtggtatttgtgtcgagtttacgtatccttggcaccatcgagtattgcactggcaaatacatttctattttaattatatattaatatgatagataaaggtagcatcttggtaatttaatattttcatttatatatcatccagtagtatttcacgtgtgtacctgtaatatttgccagttttctgttgagatgatagccttttttacaaaataaatgaacatattttagacatataataaaattttagatgccatattatatattaatatgacttaatatcttatgtaatagtgtagacatatttcttaacgatattaataatttttgtttttttacaaataaaatgttgtatactcatttataatgctactttgagactgtgtggttatataaacaccaaatttttttcttcattatctctgttcttttgtaaacctgtttttcttttactaatttccctttttgcataaaaatgtcgtaatattcattattccaaatccctctcgttatttggtttgtattgtttcatagtgttacttcctcattctttggaccagtttcaaaatcacaatggacagttcaaaaaacatgttaaggattttgattcgaattacattaaaagtataaatcggtttgaggagaactgacatctttacaacattgccccatttcctccagaagtattatctgtccgtcagctgatccatgcttttctttgtatcttcctgtgacctttgatatgtttttttcatagatgccatgttttttgtgtggctagatattttatatttttgttgctattatgaatagtttctttttattgtttttttctggctataattgttatctttctctcttggagatcatcatcaactaagtgcaagatagtgacaggaggtctagtttcacatccctggagtatctgggaatctattgttatagcctctagattctggcactggcctataatttttaccagcctaatctctgctatcccctagctatgtatactgaagctgcagtgaacacctggtccccgcagccatctcattttctccttcctgcacatttgtctctgccttgaccctgacctctgccccaggactgtgtccatgctctgacactcagctgcatgctgccttgctccctcactcgtcccacctgcatgtgactgactcttcctccagacctttgtggcattttgtttgtatctttcttgggagtatttgtcatagttcaccttttatgatttatgattatacctgtcttgcccaaaagtgtgcccgattggaaggcaaattgtaaaagactaagcactgtgacaatgggaaagtaatttagattgctctttgcctcagtctccaaactcgtataggaatactaagttgtgccctgcccactgcataagacttcgtgaaagctctttgagatgtgagaaaggcgaatctaagagatggccaccgggaggtcacttcccctcctaggttgggcagtgcatgaaggcaaggcctggctttcacagtacttcatgcaggtttcatttagctcaacaccctcctctcatagacactcacagttagattgaatcagagggtggccacgcttggcaagcggggaatagcagccaagttgtagtggacttggccgtgtacagagaaggatggattccaggtagtgaaattagaaattacacctcagtcggggacctctggttacctctggcacttacattggtctggaaagaatgtatttatgttggtggggggggaaaagcatatgaaattgagacagtaggtgatccagtggatgttctaagacattccctggaaaacaatgccactgtcttggtgtgtctgatgttctggggaacatttgaaaaacatccgtctctgggccacatctcgagtttctgattccatagtttgagcccaggaacctacgtttttacaaacatccctggtaattcctatcgtaagtttgtgaaccattgcactagaacaggattcttaatagtgacatgcaggccttactgaaaatgatttgttctgtggaatgagaagctaacaaacacacgtacaaacacacaagcacatttcctagaataggcatttctgttctgtagaatttcttcaagtgtcttcttattgatctaccaaacatgaaaatatttccaggatagaaatgctttcccagaaagcaggtataaaggtgtttcattgggaaacatattagagactctacatattagagactaacagttgttatgatgtgaattttttctgtattactacataagtcactctttcttaattgctaaaaatatttatcagtacctgatcacagaattcttacaagacagcatggtctacttacactaggcgcctcacacagcaaattaaataagtatttccgtctaagaatttgcatcctaaacacttgcaggaggataggaaatggattctgtcattataataggatttaattattcctttccatgattttaaatattatgccaaatagatgctcatcgtagtatacaagtgctgaagaatatgagtagattaaaatcactcataatcctgttttctataggcacccataagcattttctcatgtcttctctttctcttacatatgttttttgttatggagttcctacttgataagctgctttgtaaagattttaaaattcagattatatcataggtgttttcatttatcaaaaacttcgttaaatgtccttttaatgggtgcataatagtttattatattggaggtaccatactttgatatgaatatccttgcagtcagaactataaaacatggagaattacattgttagtgcattaagcatttcaactcaacacagttaattgagacatttatatcatgtgtacattttccttataacatgcacttattattccggtgacataaatcttcagaagtaaacagagaaggcaaccgctagacgtagcctgtatgtgcagtagagggcagaggaagaccagcagtgtaatcacctggaagtcatcacccaaattaccttatttcattctgcagtgatgacacaatcaaagctaatgagcaattttacttttcacttatttcgggttttgcagcatttggagttgctgacgctcattggcttcctggcatcttcttttttgctttcctcccaccgttcttccctgtttcctccttcgttcctctcagcctcttctccgcgttccggttttcccacttgtcccttgttcttatgcaatacttgatcctcttctcactctaaactgtctcctggctgatttcctcttgctcccatgtctttaacttcctcctagagatgatgtcctgccaacttaaatcttattgccactctctccactgtgagactcccctaagctcccaccactcactgtggtccttgttcagatccatgctccactgtgtgatcttggtcatcctccactccttggatcccccaatcacgtgatctctgcttgtacacattgcaccgtatatgtttgctgtgccctgacgtccaagggacacgttgcatatgtggagagcagtggcaaggaatgattgattgcttgattgaccagtaactgattggatcactaactgataggcatgaaaactcctccctcactaattcctatataatcctcatctgagcccaggatttggtgatggtgctctgtaatatgtagtccaactttctctttctcacagagcttacatttctctgtgtttgtgtgtgtgtgtgtgtgtgtgtgtgtgttgttacctacatttaaggttactcaaaaagcagcaataattgtatcttatgtaattattgtctaaatttctaatcctttggtgccgatttctgaaacaatgttaacaaaagtaatcaaaggatgaaataatatatatttaattatttttgagttgtgtcagttcttatattaaatagtgtattgaatttagggactaaaatgtaattataacaaagcaattcactctaagaacatttgattgtttataatactgtagggtgtctaacagtagataggagacctctgatatttaccatagaagttcctttaaaaaaaaaaactcataagtaatacggtttatggaaaaattcatcttgtttatggaatggtagtgcgaaatagaacttgtattttagaaatgctttaaagatcttgaatgagatatactctctcaggttcttaaacataagaatcagaatatgaaaggcatgttttattttctagattttccttctctcgccatttgactaattcttacagtaaaagtaggggaagtgaatgaagtgaacatcaatgatcccatgctaggtttgtttatcttacttttggaaaacaatgataatgattctgtgtagggctgtggtttttaaattgcttgtctgctaattataagaaaagccaagatattgaaatttgtgtagtgctaattactcatccctttctttcccgctgcaatttacagtgtgtcttcagggtgtcagtcactgatttggagcttctgcctctgcttcttctcagcaattaggtctcatcttcaactaatggaattgagtgacgtttagctagtaatatggggaatctgtcttcagctctgcttcattagaagttggtgcgaggccttgaaaaaggtttcctgtttgttgctaagacaatgtgatttgaacttactctaatacccctttttttgagtcatttttgtctcactgtcttcttactgcttgccccacatgattctttgaccatcttcatccccaaatctgaattttgccttaagcaagatgtgcaaaaagtacttggttttacttctaaagctgatgtggtttataacttactcatttcctctccccacttcactcctacagtaggttttgctgcttttattgttgtcaccagtatttctatgtggtaatgatccttgaatcttattttgctgatcatcaatctgtggaagagaaagactgttaaaagaggcctcttaactcgcactttcagaaagatggaattagatggacttttccctttttgtcctgagtacagctaaaaactgtgaacattatatgaaaagcataggaagatactgaacagtggagagaagaaggcagacagactgaggaccttgagacctgatgaatggcacagtgctggcatctctgagctttccgtttctctcatttagcttgcactgggtgttgagaagctaacagtccagttgccagtgggcacagacaagaaaagcacccccaaaccctccccttcctcccaaaggaccacaaaggaggcagcttagaatgacagaaaacttttggacaataaccactctgctatagccaaatactaccgaagaaaactgtggccatattcacaaacccccaagcaaaggctgagcagggagcttagactttcagcgtgacccccatcagaatggtaagaaagaaggatgggtgtggggccaaggcttgtgtctcctcggtgtggtcacgcgttccctctcacggtattggagagagcacctgaggcgcctgaacttccaccttacctggtgctgtcagggtgtcccttgtcctccccactggggtgatatcagaagaggcctagtggagaatcaggattttcccatcttctcagtggtgacaagggccctcctcactcagagcgtcagtggaggcgtataaggagcagtcacagaaccctctgcacctctatctcagctcaggctgctatagtaaaacaccacaaatactggggcttagacagcggacgtctatttcctcacagttctggaggctaaaagttcaaggtcaaggtgctggccagctcatttcttggtgagggctttcttcctggcttgtaaacaaccaccttctcgctgtgtcctcacatggcaggtagagagagagaacaaactctctggtgtctcttcttataagggaaccagtttcatcataagtgccctgtgctcataacctcatctaaccctaattagttcccaaatgtcctatctctaaatgccatctcattagagtttaaggcttcaaaatacgaatcagttggggaggacacaaaggatcagtctataataacctcctacccaggagagacatcagcagagaggcccaggggacgctggagctttcacccaaacctgggaggaacaaggaatcaacttcccactcccaggtgtcaagagaggccaagtggggctcctggatgtccacctgccacctggcagaaatgaagggcggcacttctcttggattcctactagtgcagtgtcagaagaggcctgataaaatagaaggctaaagtaacatacacaatctcataacatgatatcccctaatgtccaggtttctagtgaaaatcattgatcataacaagaaccaagaatatctcaacttgaatgaggaaagacaagaaacacccacaacaagatgatacagatgttagagatgtccgaccagcattttaaagccagtcataaaaatgcaatcaatgaggaattacaaacatgctggaaatagaaagaaaaaagaggccatttcatcaaagcaatcgaaagtctcagcaaagaaatagaagagataatagagtactgaatggaaattttagaactagaaaatttaataaattcaattaatcttgatgatgtactcaacagcagaatggagaggacagggaaaagaatccgtgaacttgaagataaaaaaaatagaaaatacttgatctgaacaacagagaaaacagactaaacaaacaaacctcagagcctcagagatttctgggactacaataaaagatttcatgtttgtatagtcagtatccaagaagaagagaaagagggtagagttgaagaattattcaaagaaataatggttaaagatttcctgaatatggcattttaaaatatggcaaattcgttgaagaattgttcaaagaaataatggttaaagatttcctgaatatggcattttaaaacacataacctttcaagaagccgagagaatcccaagatcaaagaaatgcacatcaagaaacatagtagttaaacttctagaactaaggacaaagaaaaaaaattctaaatgcagccagagaaaacagtacctgacatatagggggaaacaatttgaatgtcatcagatgatctctcatcagaaattgtagtgaccacaagaaggtggcaaacatttttcacttactgaaagacaagaactgtcaactgctaattttaaagctggtgaaactatccttcaggaatgaaggggaaattcagacattctcaaatgaagggaaaactaaaggaatgtgtttctataatacctacccttaaagaacaggtaaaggaagcactccataaacgattttttatttttattaagatgagagttatcttgggacatcaagaaagaaaaaagaacagaaaaagcagaaatatagataaatagacttttcttttccttttgagttgtctaaattatgtttgttggttgatgtaaaaagtataacattgtcaaatgtagttcacagtgatatagaggagatgtttatgacagtcatacttggtgtaggataagggacttaaagaatggtaaggtttttatacttaaactggtaaacgttgatactaacacaccataagccttgtggatataatgcaataattaaagcaaccactaaaaagctatccagagagacacaaaaatgccataggtatgtcaaaatagaatttcaataaaatgttcaagtaacagaaaagcaaaaaagaaatcagggaaacaagaaaacagagaacacccacaacaaacaaacaaaaatggtgaacttaagccccagaatgcccataattatagtaagtgtaaatggtttaaatacaccaatgaaaatgtagagacaatagagaaaagtcgattcatctatacttttgcactttttgttctttcttctttccttccagatgaccccaaatacctcccaccttttttccccttatttctatttttttggtgtgcttccgtcagctattccttaaaggtgggtattataggaacccattctcttagtttttcttcactgataggagattggtagagtaaagaaaaaaaatgtggagagcggacatcttgtggctgtgtcgtgcgcgtgagccccatagggctggggaggaaccagttgccgcgcagggaggaggctgaggctatctacgtagaaaattccaaggaatctatttaaaaaaaactcagaataagttcagtaagatcaacatacaaaaatcaatcacatttctatacagtagcagtaagcgtggaaattgacagagaatacaatactgtttaaaattgctttaaaaaacacttaggtataaatccaacagaacatatacagcacttgatgttgaaaactacaaaataccgatgacagaaatcaaagtgctaaatttgtggccaacatgccgtgttcaacatgtccatgtctataaaaagtggactatgtgtctataaaaagtgaatttttcccaaattgatgtataggtttaatgtaattcatatcaaaatcgtagcaagactttgtgtaggtacagaaaagattgttctagttgggagtggtagcacgtgcctgtagtcccagctacttgggaccgtggggcaggtggattgcttgattccaggatttggggttgtagtgagctatgatcgtgctacagtgccctagcttgggtgatagagcgagaccctgtctcaaaaaaacccaaaaatataaaagattattctaaaatttatgtggttaagcaaaggagctggaataggtgaacagttttggaaaagacggataaggtacaaaggatcactctattcaatctgaattcttacaatataggtaatgtaataaaaactgtgatattgttgtagggatagacacatgaatcaatggaacagaatggggaacatagaaataggcccacataagtacagccaagagatttttgacaaaagcataaaagcaattcaatggaggaagaatagtcttttcaacaaatgctgctagagtggttggacgtgcataagcaaaaaaaaaaaaaaaaaaaaagaaaaaagaaaaattgtatcttgacctacaccctaatctttatataaaaatttacttaaagtgtgttggattaagtgtgaaatgtaaaactgttaaactttcagaagaataaacctctggggtttagaacttagtgaagtgttcttagacatgacaccagagacacagtccataaatgtaaaaattcaataagttggaattcattaaaatttaaaacatctgctctgcaaggggatgaaaagacaaaccatagactgtaataaactatttctaagctacatatttgagaaagtggccatatttggaatacataaagatttctcaaaattctacaattaaaaaaatctaatgctaaaatgggcaaaagacgagacattttactattgtacgttttcttgtgggagcaaagtaaatctttttaaaaagcaactgtgtctttttcaactcacttcttggaagtgatgatggaagtgtgtattcgtggctcctgcagaggttttagctggactttccatactggacatgaataagcacccctctccccctccacattagggccggatagcattcaccactctcacctgcttagtcttctgccccaaactgcttcattcatacctgcttctggaacattttctcgtacactgactccagcacagaggctgttctttctaagttctccctgaattagcagtgatgagatgcctcatgacccgagaaacctggccttggctgttccccatgttggactagtattggagatcacatagtttattgtttcacttgtcattgactagaaaataaattagaaagatggttcaagttcagcatttttactcatggtactccttgacttctgcctgttttgcaaaagagggtctgtagatgacaaaaacatgaaaaagacattcagtggaaatgcagattgaaaccaaaataagagatcactagctattagaacagctaaaataaaaagtagtgacagtaccaaatactcaggaagatgcaaagaaattggatgtttcatgcgttgctggtggagatataaattggtgcatctagaaaatattggaaaatagtagtttctttaaaaagtaaatgcgagactctgtctcaaaaaaaaaaaaaaaaaaaaatgtatgccgacgatacgacttagttctcctgaacgtttgtcccagagaaatgaaaacctgtgtctacacaaaatatgcttctggacattctagaagctttcattgtaatggccacaaattggaaataacccacgtatttttcaatgagtgaataattttacaaattatggtgcattcatgtcatagaacactactctgcatcataaaggagtgagccgttaataatgtaacacttgggtgaatgagtctgaggggaattacactgaaaaaaagcctgacttgaaaggtcacatgttgtatgattacatttatgtaacattctcaaaatgagaaaattatatagttgaactaactagtggatgccaggttgggatgaatgggaggattagatgtgtctattagagtagcaagagggaggtgtgtatggtgatggcagttttgtggctggactgtagtggtggtgaagtcagctacacatgtgataaagtgacagagctatactcacacattgcactaatttcaatttcctgatttttcaatgcattgtatttccttaagcagtatccattaagagaatcagggtaaagggcgcctgattttctctgttctatttttccaatttcctatgaatctataattatttcaaagtaaaatactgtttttttccttgaaaaaggagacttctccaatgtccttcaaaaatatctgtcgttggcttcccaagacgtgtgaatttgttgttgttttattgtgtttttgttttgtgtttgttggcatcaaccaatattttctttattttatttctgcacattttacttttgtttttcatctttttatttcaataacttttggagtacaaatggcttttggttacatggatgaattgtatggtggtgaagtctgagattttagtgtacccatcacctgagtattgtacattgcacccagtttgtcgttttttcttcctcccctttctgagttcccatagtccattatattgcactgtatgcctttgcgtatccacagctttgcttccacttataagtgagaacatatggtatttagttttctattcctgagttacttcacttggaataatggccttcagctccattcaagtttccgccaaagacgttattttgttcttttttttatggatgagtagtattctatggtgtatatataccattttttctttatctactcattgtttgatgccacattttctttatccacgcattgttcgatgggcacttaggatgaggatccatgccaatatcgattttttttttttttactttttaataatggccattcttgcaggagtaaggtggcatctcactgtagttttaatttgcatttccctgatgattagtgatgttaagtatgtctcttgtatatcttcttttgagaaatgtctatttatgtcctttgtccactgtttgatgatgatatttgtggttttcttactgattagtttgagttccttgtgttttctggatatcagtgctttgctggattcatagtttgcaaatactttcccccattctgtaggttgtctgtttactcttgatgattgtttcttttgctgtacagaagctttttagtttaattagatcccatttatttattttcatttttgttgcatttgcttttgaggtctcagtcatgaattcttttcctaggccaatgtccaaaagagtttatcctaggatatctaatagagttttatggtttcaggtcttagatttaagtctttcaccatcttgagttgatttttgaataaggtaagagacagggattcagtttcattcttctacatgtggctagccacttttctcaataccatttattaaatagagtatgctttccccaatttatgtttttgcgtgctttgtcaaagatcagttgattttaagtatttggctttatttctaggctctctactctgtttcattggtctatgtgtctacttttgtatcagtaccatgctgttttggtaactgtagttttgtagtataatttgaagtctggcaatgtgatgcttccagatttgttctttttgcttaggattgctttgggtcttagggctctgttttgtatccatatgaattttagtatttttttttctaattccgttaaaaatgatataggtattttgataggaattgcatgcaatctgtagattgttttggatagtatggtcattttcatgatactgattctttcaatccatgagcatgggatgtgtttccatttatttgtcatctatgatttttttcagcagtggtttgtagttctctgaagagatttttcacctgcttggttaagtatattcctagtgattttattttattttattttattttattttattttattttattttattttattttattttattttattttttattttatttttgcagcttttgtaaaagggattgagttcatgatttgagtctcagtttggtggttgttggcatgtagcaatgctactgattggtatacattgatttttgtgaactgaaactttactaaattcatttatcgaatcaagtagtcctttagaggagtctttagggttttctagttatgtgaccatggcattggcagacagcaataatttgactctctcttttccaatttgggtgccctttaattttttttttatcttgcctgattcctctggctaggacttccagtactgtgttgaatagaagtggtgaaagtggtcatccttgacctatttcagttctcagggagaatacttgcagctttgtgccattcatgatgcaactgtcatgatgttggatgtgggtttgccacagatggcttttattttgaggtaagtcccatctatgcctagtttgttgagggtttttataataaagggatgctagattttatcgaatgtcttttctgcatctattgaaatgattatatggtttttgtttttaattctttttatgtgatatatcacatttattgattcatgtatgttaaacctccctgcatttctggaatgaaacccacttgagcatggttattatattttgatgtgctgttggattcaattagttcatattttgttgaggatttttgcatctatattcatcaaggatattggtctgtagttttattttttgttgctgttatgtctttcctggcttggtaccagggtgatactggcttcacagatgagttagggaggattccctctttctcagtcttttggaatagtttcagtaggattggcaccaattctttgaatgtctagtagaattcagctgtaaatccatctggtcctgggcttttttgttggcatttttcttttttatggagtcttgctctgtcacccaggctggagtgcagtggcacgatctcagctcactacaagctccgcctcctgggttcacaccattctcctgcctcggcctcccaaatagctgggactacaggtgcccgccaccacacccggctaatttttttgtatttttagtagagatggggtttcaccatgttagccaggatggttgcgatctcctgacctcgtgatccacccactttggcctcccaaagtgctgggattataggcgtgagccactgtgctcggccagcaacttttttttaaattactcattcagtctcactgcttgttactggtctgtttagagtttctgtttcttcttgatttaatcaaggagggttatatgtttccaggaatttattcatttcctccagattttctaatttgtgtgcacaaaggtgttcatagtagtatcaaatgatcttttgtatttctgtgctgtcagttgtaatgtctctagttttattactaattgagtttatttgaatcttttcttctcttggttagtctagctaatggtctatcaactttgtcttttcaaagaacaagatttttgtttcattgatattttgtttttgttttttgtttcaattttatttcattttgctctggatctttgttatttattttcttctgctagctttgggtttagtttgttcttgtttctctagttccttgagatatgacattagattgtcaatttatgatctttcagaattttttgtggaggcactttatgctataaacttttctcttagcattgcttttgctgtatccaagaagttttgataacttgtgtcactgttatttatttcaaagaatttttaaatttccatcttgatttcattgtcaattcaaaaatcattccaggagcaggttgtttaatttacatgtgtttgtagttttcaaggttccttttgtagttcatttctcattttattctattctgatcagagaaaatacttgaagtgattttgatttttaaaacatttatcgagacttgttttgtaatccattatacggtctatcttggagactgttccatatgctgatgagaagaatgtgtatctgcagttcttgggtagaatgttctgtaaatatctgttaggtccatttgttctacaggagtttaagtccattgtttgttcgttgactttctctcttgattgtctgtctggtgctgtcagtggggagctgaaggccccccctattatcgtgtttctgtttatctcatctcttaggtctaatagtaaatgtttcatgaatctgtgagctctagtgttaaatgcatagaaacttaggattgtaattcttcttgttggattcatcctcttatcattacataatgaccttttgtgtctctttttttctttactgttgttgctttaaagtctgttttatgtgatataagaatagctacttctgctcacttttgatttctatttgcatggaatatctttttccatccccttaccttgagtttttatgaatcctcatgtattagtctcattgctataaagaaatacctgagactgagtaatttatttttttttaaaaagaggtttagatagctcatggtactgtaggttgtacaggaagcgtgatgctgctcagcttctggggaggcctcaggaaacttacagtcatggcagaaggcaaagaggagcaggcacatcttacatgacaggaacaggagcaagagagaatgagaggggagatgccacacactttaaaatgaccagatctcacgagaactcactcactatcacaaggacagtaccaggaggggtggcactaaaccattcatgagaaacccacctccaaggtccagttacctcccaccaggccctccatacctccaaggtccagttacctcccaccaggccctccatacctccaaggtccagttacctcccaccaggccctccatacctccaaggtccagttacctcccaccaggccctccatacctccaaggtccagttacctcccaccaggccctccatacctccaaggtccagttacctcccaccaggccctccatacctccaaggtccagttacctcccaccaggccctccatacctccaaggtccagttacctcccaccaggccctccatacctccaaggtccagttacctcccaccaggccctccatacctccaaggtccagttacctcccaccaggccctccatacctccaaggtccagttacctcccaccaggccctccatacctccaaggtccagttacctcccaccaggccctccattcaacattggaaattacagtttgaaacgagatttgggcaggggcacatatccaaactctattaccttacatgtcaagtgagtctcttgaagacatcagatatttggtttgtattttctatctattctgcccatgtgtatcttttaagtggagcatttaggccatttacattcagtgttaatatttaagtgaagcacttaggccatttacatttaatgttaatactgcattcatgatactcttccagccatcatgttaattgttgcctagatactttattttatttattgcattattgttttataggccctgtggctattatgctttcaagaagttctattatggtgcataacaaccttttgtttcagaattcagaactccttttagcatttcttgtagggctggcctggtagtgacaaattctctcagcatttatttgtctgaaaattactttatttctccttcaattatgaaacttagttctgctggatacaaaattcttggctgacagttattctgtttaaggagcctcaagataggaccccacatcctttgggcttgtaaggtttctcctgagaagtctgctgatagaagtcaggaatggtttccctccatccatgctggagactgggcatgcatgcaaggcccttccttctgctgctcctacttaatattccccacccctccctgtatcaggttcagcactaggtagggttaaggctttctctgtggactggattgccaggttccctggaggcagtccgtcccactgtcatactcacagttcttcacctggctcatggtgtaggctgcagcctgctgcttctttcaaagggtctgtggtttctttccatttttctgttaaattccttcattgtttcttggaagaaagttaatggtgtgtctctgcagactattttttctttccaagggggagacgcatgctaacactgcctccaatccaccatattgaaaaaaagaagttttcctatttttaaagtaaaatccttttcttgaaattgggcttttgaaacatttgcctaggtactttgcaagatgaaccaaacttctaatatcaaagggaacttggcccaccaaagggtagaagctgtaggctctctcctcctgctgtttgtcatcaaggcccacacaggggtcctggccccagctgcaagatgggctttgtgtgagctcacaggagcaaagcacgtgccaggtgccccgagacttaaatgttctctctgcttttatatcttttcatcatttcatagtttctgaaattatttgacatattacttgactataaaggaaaaaaaatcagagattttattaaaactctgtaaacattcctaattaaacctcacatgttgttcacaaaccttttatgttttaagctgcttcaggacagagaattgattctcctctcatttttcactgacagatctggtggtacttagagccagtaacatgcagcagttaattatgctgctgtcccacatgtgtacattttgttttcttgcctgtatttgttataaagagggttcatgttacattcctctgcaccctccagaatgattaggtgggcgtgagatcctcacatactgaacacacacttagtaactttcttgttgactggttattctgttgtttcatgttattttaatgagactgggaaaaaagccattgctcaaatctggttattctttattaaagttctcatattggaattattaaggactaatgtcattagggacatttctacttttgatatagaaacaagctgcttagggaaaaatctcctgttttcatgcttgacagtgtagtttctcgtagttaaaacaagtctttatgtactgttttatctcctgtgctaaaacagaacggtgaaatctaaggcaaacattgtgtgtgtgcttcgacactctcgtaaattactcttgccattaatttaaccacagttgtgttatcacttgacctaaaggggctcctggatgattgggaaaccagcagagaggctaatgggccaacaatcttggcagccaacctccgtgtatgtcttggaaaattccttcaggatgtttgctttggcatttgattgttcctatcttcagattaccttattttatagtatattgaatgttgcatcattaacaaatacctggttgatatctttattactgtggcttcaggcagtaatacaaagatttttctctaaaatacaaagtgtatttgaaagcttttctttacatgtatatcagtttcaaactttacaattaaattttattcccaggaaactctcaggatgttcttttgtgtattcataaggtataatttgatggcaacttatattatttttcagaaaggaaaatagtttcgtatccaaaagtttgaattgtcttatttaagaaagttgacacactttaatcacaggaaacagtatgatttgacttttctaaaccacataaaagtatttctaaatatttttgcagatctcttcttctctttaaagtgagaataatcttctttaattttggagactgtgctaaccattatctttgctattaaggattagttttgtaactaaatatgtgttgagtcctgggctcacacttcagggatacatcaggagacaagtaaggcctctgacctcgtaaaatttacctgggagagacaggtagttccaagtaaacaaatgaataaacaagatgatgatagatggctgtgaattctatgaaggaaacaatgactcaggtcatggaggtgatagtttgctttggtgggtgatcgggaaggctgctctagggaggtgacatttgcatagcttcctaagtataagaaggagccagagatgctgctggtaccagggctcagagcatttcaggccatggagttgacatgttcaaagagcccaaagcagaaaagctgtttggtcaagaaacaggaagaaaatgactgtggctgtagtatcataagccaggcaaagggtcaaggcagggtgggagagttaggcaggaaccagatcctgcaggccctggaggccattgaggttcttcccattctgagtacagtggggagcttctgtatgcctggaagctgggggcgttgtgatcttttgatttgactcctgggagaccagggaggagccctgccatggtagacttccaggggaaacatctctgtggctgttttcctgtgcgggcaagttactttgtctaaagcccagtttccacattagtgaacaagattaatgatggcatctacacagtagggttggtgtgacagttccataagaacatgcatgtgaaacggttaatccagtgcttggagaaaagcaaatgctctacagcagaggtccgcaacccttgggtaggaaccaggccagtccatggcctgttaggaaccaggctgcacagcaggaggcgcagggtgggcaagtgagcgaagtctcatctgtatttacagccattccccatcacttgcattcctgcctgagccccacctcctgtcagatcagtggcagcatatgattctcataggaccgtgaaccttattgtgaactgtgcgtgtgagggtcctaggttgcacgctacttatgagaatctaatgcctgatgatctgtcactgtctcccatcacccccagatgggactgtctagttgtaagaaaacaagttcagagcttccactgattctgcgttatggtgagttgtataacgatttcattatgtattacagtgtaataataatagaattaaagtacacaataaatgtaatgcacttgaatcattccaaaaccatcccccaaccctctggtctgtggataaattgtttttcatgaaactggtccctggtgccaagaaggttggggactgctgctctacagcattataacgatattgtcatgttgttttaaagatggataggacatttcactgccttcctgaagcgcatggcagtgggcatatgaacagacatttactgggcagtagttaccttgttagagaaatgggtacaagagtatacctgttcacctaggaaagaagttcattctgaggaaagggtcagaaaagtcttcctaaaggagcagagtctaaatgtggctaaataaacaaggaatggccctgcgacttggcccaggtgcccccacaatatagaccccttggaccttcagtggtgccattggattctctcctttggttagtgcactgttccctgaaagcttctgtgagctgcaaacccatatgcctgacacccaggaatgctgattgctgttggccacaagcttgtcttaaggggatgggcaccaaggcgtgcccatgtggctggggcatggcagggtgccaggaggcaggtgctgcgtccctggagaagcagatcttgcacagcggggagcaggctgaaggcaccaggaaccctctgccagcacacccctgagataagcacttccttcaaagctgagtccggctgctcagcgaattgatggatgatgaagacattgtcttcctttgttaggataagaaggataatgatctttctccttccaagtcgtctgggagctcaggctctgtgttgtgataaagtacaattggggttgtttgtctttccatgcttacagaaatcctattcctcaagaaaagaaagaaagagcctacaaagaacttaaaactaagtaaggacttcaaaaaagaaaggtggagagaggggaaaagatgactgctacacattttccctttgcttcccacgggaatggcttcattcttgccttgagtgtcttagatatgtctctcccccacccgcagcactggcttttctgtcttttaccattgaattaggcctggtctagacttcagtatttatacctgagagtacagaaaagaggcttttcaagaatacgtcagttctgttagaataagatcccatccgtcatcagatacctttctacagctttctgtcacagtatttgatcactgatcatagaacctggactagagatttcatgtggagaatgtactcccttcaaaaggaaaaccattcaacaatttaatatttaattgattaaatacatgtgatttgctaatgttaaggtattatagtcacagcccctcacttgttgacaagtcctatatcaagtaatcatagtgattaaaaacaaaaccgagagtcaggaatcagcaaatcaggctttccactgccaaaatgaacattatattaattcatgactttatttaaaagagagagcacctcagaccctaattcaaagactgtttcatctcagcccacaaacatcgaaatatcagatgagaaacattttgagaggcaggtgtgcagacggcagcaagtcgtgagccggctgcctgacagcaaaggaggaagcgtttaaagtatggagccaggaattcaaaacaacaacacgttgacgccatggtgcacatccagggcaacagaaagagctctggacttagactcagagggacgggaaaaactcagaggctgcagatagaccaggaggtagaggccttgatcactccttgtgtagccagacccgttgcttaaaatctctgaacttccttattgtaaaatatgaaggaaaatcattactattcttagaattaaatatttgtgaaaggagctttagaatgatagaagtaccatagggatgttattatcttttttactctcttttcaacctgtcaattacctgtttaaatatgaactagttattcgcccttccagagtctcagtttcctcttaaattaagaataataagtttatcccatttgctcatttcacatcagtcctttaagtgctttgcattttgttacatcttatgtaagtggtgatattagcattactacattgtaacacagtacacaacatctgaaaatggtcctgaggccttcaaagtttaaatgtcgtttaatacactttattgaagcaggtacagaactgctgtgtaattaatttcaagacacttattttctctcaaaagtgcttctaaaacaagtttccatgcttgaagcgttgagtgtcaagtatctgggagatttgcttttgtaggacggttcatttcccacttgtgccagaatgagtcattttgtgtgtaagtgtcaagcttggagaggttctaattaagtgcaaattacaatgaaattaataaatgacaccaatttttagattttaaaatgtgctttgagagaatgcaatgtgggcttagattgatggtaattctcatattttaagttgtgattcaatattatgtagcattaaaactcaattaagtaaaaaataaatgaagaatcaagtagagagaatactcatctctcagatgcctcagcttctccaatgatggcttaaaatctgttaaatgctaaggttgtaattgtccttattgttcactatattccaaaataattgcacatataattagcttatttagtgagagatactaaatcaccctgttcacaaatatactagatcgtcataaattgtacaaatgtaattgtaaatttaaggttttattttactttttgcagatgagctgcagactatatataaattcatgtatgtatccacttaccagaaattttattaaatcaaaatatatttgacccagcattttccgatccgtttacagtgggagaaggtaggctacgtaggttcttccctcctcaggtggcactagtcaagactgacagagccaccagcaactgatagcccaaagatatcctctcagcctaccgaaccagacacccctcaccttctacctggtgatgcagggaagcccagggaagtgcgttctgtcccacaggaggcaatagcagggatagagaaggatccccagaccctacagaacaaaggagaccaggacagctctgaaaaacacattatcattggaactacagcccaaaaaagtaggcaaagtcctataccctaaacccatcaggcaactgccatctaaaataaaagatttaaataggacaaggagtcttaacataatatcgaaaacgtccacagagaatggaaaattactgaacatacaaagaacaaggaaaaatcacaacttgaatgagaagacacaatcaactgaggccaaaattgaagtgagtcagctgttgcaattaccagacaaggattttaaagcagccatcataaaagggcgtcagcagcaaactattcattctccttgaacaaatgaagaaatagaaaaatctcagcaaagaagaagaaattatttaaaaagtgaaagtgagtgaattgaaacattccataaccagaattaaaaactagcaggattagctcagtaataaagtggagaagacaaagatagatcggtgaatatgaggatagatcaatagaatttgctcagtctgaccaacaatgaaaaaggtagacaaaaaaaaaaaaaaaatgaacagaggctcctgtgaggctgtaaccaaagatctaactttaattttattggagttctagtaggagatgagaaagaaaattgggactgaaaaagcattcaaagaaataataggtgaaagctttctaaattgggggaaaaaaaaaactccacaagcctacagattcaagaagctgaatgaatcacaatagaccctaagaaatcaatttgaagacacttaaacttctgtgttgaaaataagtaatttctgaaagctaaggaaaaattagaactctgaaaaaaatctgtcaaccatgaattctgtatttggcaaaaatatcattcaagtatgaggggaggccacgtgttatcacgtgtaatatcagacctgtaatcccaccactttgagggacattgatgagggaggattgcttgaggccaggaatttgaggccagcctgggcaaggtagtgagaccccattgctacaaacaaatcaaaaaattagccaggcgtggtgcacacccctgtagtcccagctactcaggaggctgaggtggagaactgcttgagcccaggaggtcagtgctgcagtgagctattacggcgccattgcacttcagcctgggtgacaaagtgagaccctgtctcaccaaaaaaaaagaaaaaaaaaaaagaaaaaggaaaaatcaaactaaggaaaaatcagataatgtgttgctataatagttaaatgaggtcctccaaacagaaagaagaaaatgatcagagaagaaggcttgcaactacagaaaagaaagaagaacaaataagtggataataggggtaaataaaatacactacttttcacttcatgagtttcctaaattatatttgaagtttgaagaaaaaaaatttaattccatctcaagcagtgttaaatgtatgtagcagaaatacttaagactattagattttaaaagtggggaagggaaaaagatttcagtccttcctttgaaggagtggaatgaggatacaagtaggctgtgataggttatagatgcctcttataacaattagaggaactaattgaccgaaatagaccatatcctggttcataaaatctcaatgaattttaaagaatagaaatgcatagtatgttctgtaaaaataaaggaatcaaactagaaattaacagagagataacaggaaaactttaaacatgtggatattaaacaacttctaaataatccatgtgtcaaagaaagtatcttaaagggaataaaggaaacactgaactgaatgaaaaatcaaaatgcaaaacaccataatttggcagatgcaactaagggcatgctgagaggaaaatttatagcattaaatgtgtatattagaaagagggaagtctcaaatcaataatttaagctcccacctaagaacctagaaaaagcagataataagagaaaagacacaaatcactaatgttgtaaatgaaatgacctatcactatggttactgtagcctttaaaagaatgataggaaaatactacagcaggtttatgcccataaagttgaaaacttagattagctggaccaaatgctcaaaaactacaaagtgccaaaaactcaacctatagatatataacctgaatagtcttaaagcccttagagaaacttaatttgcagttaaaccctccccacttgatatcctggcagagatcatttgacttgagaaatttgccacacatttaaagaagaatttaaatcagttttacagggttttgtttattaaattaagagtaggaaacacttcccaattcatgttgtgaggccagtattattctgatacctggaacagccaaagacagcatttaaaaaaaaaaaaaactgtaaacctttatgtctcatgaatataggtgcaaaaattctcaacacagtaatggcaaactgaatccagcaaagtacaggaagaattagacaccgtaaccaagtgggtgttattccaggcatgcaaggctggcttcatatttgaaaatcaactcatgtaagtcatactaacagcagtccagagaagaaactttatgagcatatccattgacacagaaaaagcgtttgataaaatccaacactcagctggttgcggtggctcatccctgtgatcccagcactttcaaaggccgagatgggtggaatcacttgggctcagaagttggagaccagcctgggtgacatggtgaaaccctgtctcaaaaaaataataaaaataataaattggccagctgtggtgccaggtgcctgtagttccagatacatggtgggcctaaggtgggaggatcgcttgagccccggaggttgaggcccggaggttgaggctgcagtgagccatgtttgcaccactgcactccagcctgggtgacaaagcaaaactgtatctcaataaataaataaataaataaataaataaataaataaataaataaataaataaataaataaataaatatctaacactcattcatgctaaaaattctcagcaatctagttatagggagtagcttcatcaacttcgtaaagagtatgtacagaaacttacaactaatacacttagtggtgagaaggtgaatgctttttccccaaagttgggaaccaggcaagaatgaccgctctcccactcttaacagagtacctaaccagtacaataaggtaggaaaaaaaaaggcatccaagtttgaaaggaggaataaaagtgttcttatttgtggatgacattattgtcttcattgaaaatccaaaggaatttacaaaaaagtcccaagctaataagtgattccagcaagcttgcagtatacaaaatcaacacataaaaatccatcacgtttctatataataacgcgtggaaaccaaattaaaaatacaataatacaatgccatttataattgttccttgcttttcatcctaatgcctaagtcctgggaacaaatcttgtttgtagatatacccaaatctatattataggtatacccaagtctgtatttcatttggggataaatctaacaagaatagaaactattttgaaatttacaaaatgctgagaaatggaagaaatcaaagacctaaaaaatcagagagactttggggatcagaaaacccagaaaggttttttttttttttttttaaatataggtactagacctagacagtctcattctgaaatgtagatggcatagcacaggacctataataactaaaacaactctgaaaaagaagaaaaaagtaggaggaatcattgtttccagtgttaacgcttactgtatcctgacagtaatcgtgactgtgtggtactggcaaaggaaaagagacataggtcagtaggacaagacagagaacccagaaacagacccacacgaatatgcccaactaatttttgacaaaggtgcagaagtgactcagtgaagaaaaggtggcctttacaataattgtagctggagcacttggacatttaggacaaaagtgggtggaaccttgacctaaagttcatatttcattaaaaagaaaactcaaaaaagtatcacataaaataaaaactgtaaaactttaaaacttttaggagtccgggtgtggtggctcacgcctgtaatcccagcagtctgggaggctgaggtgggtggatcatgaggtgaagagattgagaccatcctggccaacatggtgaaaccccgtctctactaaaactacaaaaattagctgggtgtggtggtgcgtgcctgaagtccaagctactcaggagactgaggcaagagaattgcttgaacccgggaggcggaagttgcagtgagccgagatcgtgccactgcaccccagtctggtgacagaacaagactccatctcttaaaaaaaaaaaaagaaagaaaaggaaaactcagagtatctttgggatctaagactaagagaagagtttttaaatttgatgataccaaaggtacgatttacaaaaataaaatcttatcacaattaaaaacttttatgaatgaccttattaagagtataaaaaccagccactcgggaggctgagggaggggaattgcttgaaccagagaggtggaggttgcattgaggcaagattgtgccattgcactccagcctgggcgacagagcgagactctgtgtcaaaaaacaacaacaaaaaaagtataaaaacaaaaactgcagacatggaaaaaaaatttgtaaaccacgtacctgatgaagaactagaatatactagaatatattgaatatatagactactcttagaactcaacattaaaaacctatcagaaaatgtgcaaaatacatacacagatatttcaccaaagaggatatacaaatggcaaacaaacatgtataaagatattcaactttactagccaccaggaaaatataaactgaaaccacaaggagatatcactacaaacccatcagaatggataaaataaaaaagttgatagcaccagataatggcgtgagaatgcagagaaactggatcactcatatattgttagtgggaatgtaacctggtacagccactctagaaaatagggagttgagaatttcttcccaacttactctgtgacccatgggtgcttactttatgatcctttgcaagctactgcattcttgggcatatctcagagaatgaaaactacgttcacacaaaaacctgtacatgagtgtttctagcaccattgtttgtaatagcccaaacctaggaaaagttcaaatatcttgcaatagacaaatatttaaaacacagtgtagtacttccattccatcacacatcgctcataataagaagtgatgggcttctgatacacacaactgggatagacctcaagagagttatattgagtgagaaaagccaatctcaaatggtcacagaccgcatgagtccatttagattccatttatttaagatccctcaagttacacagttacagcaatggagaagagatcttttgttgccaggagttaggctttgggatggagagcaagggcatgggtggggcttaaaaagggagctggagggagcttggaggtgatggaactgttccctctcttggttgtggtggtagttacataaagctacgcgtgtgataaaattgcatagagtgtatttacacccatccatgagtgcaggcactgctggtgtcatctgaatactctctatgaattctcccaacatcagtttcctggttttgatgttgtttggtaaactgtagttactcagcacgatgttggcactggggcaggttgggtgaaggatgaatgggtttcactgtacatttctttgaactcctcgtaaatctaattatttcaaaataaaatgaattaaagacaatatgaatgagagaacatcaaataataaggctttcacagtacagcgtaggcttctaaagtttgggaggagggccttgagatgatttggtaacacctctgtgggtgcacccttctgacgcaaatgaccctctgttgtctcttctgctctaaccaggcatcagctatgtgggtgtctggtgtttccaaaggagggtaggatgagatcagagagtgcattgtgtgctcactgaggaagggggaggaataatgatctgttcccaggattaagaaagaggaagaggagatacaggaccataagaaaagagaacccagagctgagagcttgtaggaatgtctctgctccattctactagggcttagaccggttggcataacaacttcatgaactgtcggccatccttaagctctcctttaggtaccaattatctcctgattttctcttcattattaacagtaaattattttcctttcctctttcctttcctttcctttctgacaaagtctgtctttatcacccagtctggaaggcagtggcaacgatcatgcctcactgcagccttgacctcttgttttttttgtttttttgaggttatttttgtagagccagggtttcaccatgttacccaggctggtcttgaactcctgagctctagtgatcttccttccttggactcccaaagtgctggaattacagatgtgagccaccaggccagcccaggttagcagtaaatcttgctaagattggcccataaagaataccctggcttggtagactgtacagaagaaggggagactcggagaccacgtcctatgccatagccactattagagagacaggagccccaagaacagtcgaagaggagtggagtttaggaaacaatcagaacaatctctctcccctggtatggcagccgcaaggaaggggcaccctggggagtcagcccagggtagagaagtacatttggagcctttaatcagggaagcttgcagggctgcggcactcaccgcaggggacaccaccagggggaaagcaggcaggagccatttgccttccctcctcttcaatcctgtatctatgtccctgtgctgctgaggtccaggagctccttagggatgcactgtgtgtacgcgccttagcacgctgcacaattccggacacacggggtgcttataaagcgctgtggtgtatttagcagcatcctgtagccaccacatggtgcccagacagctgcaggctgaactcaagtgccccaccccctggtgcagaatcctcagatccggggactcgcgcgggtggctcagcaccgccctctgtctgttcttaggtcttgctcagaggctgaagcagggtgggctttctggctcacagggccatctgaccactcccctcctggccattccccctcctctctcaggacatatgctttccccaagatggagaggagagccagcctgaatccttggtgtttgtaaactcctttcacctggaaattgctttacatgttttaaacttcacattactctttgggagaagaaaagaagtaacaagtaatattcaatttcacacttgggaaacaaacagtgaagttaagtaactttcataatgccagatagcatatctgtgttaggaaagaatgtgtgagtccatataaaattctgtcctcagacgtttctcaagtgtgttctaaaataaaaggcttctgtactcaaaattgagctttgtccctgttgaatagtaaattaagagttcaaaatgagacagtaaataagttagaccaagtaagtaagctgcctttgagtatggaggtagagacataaattcgtatgattaccatagaaaacaggcagcactttcctgaaagaagagcaatttttatatcttaaatataagcctttgaaaaatacggtatttgttgataaaaggaaacttctaagggctgctactatatcttgatgacttaataaggggatctccctgtggatggggtaagttaaaagagattatttcttcagtttttctttattcacacactagtagcaaaattagaaacatcagtgagaaaattatatctgatttgttgatataaccttatgaactttccattataaaacctgaaattaaagtatatgttgttttctttaatgaagtttaaagaattggaagaagacatttcattcagttagtaagtaaaagttgtgtgtgtgtgtgtgtgtgtatacgtgtatatacacgtacatatacatatacacgtgtatatacacgtacatatacatatacacgtgtatatacacgtacatatacatatacacgtgtatatacacgtacttatacatatacacgtgtatatacacgtacatatacatatacacgtgtatatacacgtacatatacatatacacgtgtatatacacgtacatatatatatacacgtgtatatacacgtacatatatatatacacgtatatatatatatatatatagagagagagagagagagagagagagagagagagaaagagagagagagtctcacctgttgcctaggctggagtacagtggtgtgatctcggctcactgcaacctccgcctcccgggttcaagcgattctcctgccttagcctcccaagtagctgggattacaggcgtgtgccaccatgctcagctaatttgttgtatttttagtagagacagggtttcatcatgttggccaggctggtctcgaactcctgacctcaggtgatccacccaccttggcctcccaaattgctgggattacaggtatgaaccactgcgcccagccaaaaattgctgtatgaaatagttatcagtcaggagcaggagctcacacctgtaatcccagcactttgggagactgaggcaggaggattgcttgagcccaggagtttgagaccagcctgggcaacatagtgagaccctgtctgtacaaaacataaataaaataaaataaatagttgttattctattgtaccatcaccttattatgtctgagcagtatttgtttgatgtaggctaaaaggtgagaagagagaaacagaaaactgtgatcatgattatgccttccaaggggcctaatattgaactgtactaggtcgactattaacagactaaaaatgtttgaaagcgcatatgcaacaaaagtggtttttatcccaagaaaagccctggataggctgcctggtccttgggttgctgtcttccatgaggtgattcagagacacgggctgcttgggtcctgcagttgtactgtctaccagctcgcctgcagtcagctttcggaaggaaaaaggaatgaggagggagcccacctacctcttacaaccctggactggcctggcccagaagcatcccatgtcatttccaccacccttccaccgaagagaacttgtcacatggccatgtggccatgcctacctggaaagagggttggaaatacaattcctggctggggtttaaatgtgtattttagaaatgaaaatagattttcgtggacagccagctcagctgcctcagaggccttcttaagctgcattagcttagactttcttatttagccacatcctgattcaatgtgaatgggcctagttgttacttttaagagaaagatagatctacagagctgaatcctttttcagtagatagaggaagtaactttctgaatagagttcagttaagaaggaattgctagggactttcttgctagaagaaaatctgccctcatttgtactagagaggtaaaagaatgcagggttcaaggaagacggactttcacatggtactcccagcaatttcatgagatccaaagcacatggatctcaggactttgagtgaggaaggaactgtccttctcaaagcattgcagcctgataagggctgaaaaggaggagggacttggcagaggacctgttaagtaatcctctggctgttcgccttgcaatcagaacattgtgtaggtttgataaatttcatgtttttcaaaaaaattctctattcatagttacacaagaaactgtgatgagatccccttaagagaatattaatgctatcaatacagttactattattccagcacctttagctcactcttgccactctttggcgctctactttttaatataaaccatacatagagagacaggagccccaagaacagggaggctggccaagctggaaaaataatcaaagcattctctgtccctggagccccagccgtaagtggacaaacttcagttgccggaagccaagaccactggagagaagaaaattgctagtaccagtgtgggagttgtactgtcgtcttctcttttataagcatggtcacgaatgacatgtgatttgaaaccacaatttactaccgtaataaagtttctaaaattactgcagtcggactccaatcgtattgaacagtcaattgattctgggttaaaacatgcttacatcacaaaataatgaccggtttgagaaaaataaggttgtcttcaggagccaatatctcagtgcaagacggacactattaaaattctttaggggaaaataaattgctgatttgctaagtgtgcttgaagcaatatcaccttacatctgcctaatgttctttcctcacagcctcccagtgaaataggtaaagcaggaatttcgactttatagagaaggatctagggatatgagaatccatcatgtgagaacattttagataagtagcggaacccaattcataaaactctttacactgctccaagtaaaacagggcagccagtggattgacacacactgtttttaaagaccagatttagaggtatgctcactcaaatctgttaattctgatcagtgtgaagaacgaagttagtgcttttggatattaagatagttggtataggcaaacaatgaaatttaaaagcagtcactcgactgtaagtatttctttcttacaggaaactgtttttgcagtcttatggcaaattttgaggcccaactctcacccttttgcatgttttcctgtaggaagtaaatgaattctttgttttgtattttgttagcactttctaaagtatttgttttcatttggttttatccattgcaaggcaattgttactgattttattctttgtcgttgaatcatctccaaggttataagttatgttaaaaaacaacttagcctttaatgcttcaaaaactttaaaaggtgggtagtgggaacatcaaccactgtgttctctcatataatcgggagctgggagaaatcacagcagattttgacagtgtcctcagtaccagcagaccttcctgcagaagggtgtccaaacttcctgggctttattcctctattaaatgttctaccaactcccccaactcttctctttactcaacccttgacatgaaacacctttctactgtgtagtccattagggtgtaaatcacaccaaagaatttttgctcaaccactttgctagatagattggaaagaaacaccatttattgcatactaatcaaactgtaattgcctgtcttcctgataaattgaccatgaataaggtaggtctctttgactgacagtcttgggaatgtgcattgcagtctttataggcatgacatgcttctgataagaaagcaggcttgctgtgaggaaggaaacaatgtttccctcttttgaagggactgattttcacaattttcacttgcatcataaataggtgttggcaaaagtatcactcactgattatgtacatggcagatagagaagcatgttacttttagtttaaaaaacaaccttgttgccatgttgatttaatcagagttctgtttgtttgtgtcttctcatctaatgtgtaatcagaaccccttaataggaagtggtttcattccattgctctgtattctggagagaaagtctgatgttggatttatcattaacgtttgccatcagcttgtcaccaccaaagccctctgaattattttctgtgctctctataaggctggttctgctctgccatcctctttttgccagggagagaattttctttttttttgagacggagcctcgctctgtcactcaggctggagtgcagtggcgccatcttggctcatggcaacctccacctcctgggttcaagcaattctccagcctcagcctcctgagtagctgggattataggcacacaccagcgcgtccggctaaattttgtatttttagtagagacggggtttcaccatgttggccgggctggtctcgaactcctgacctcgggtgatccacccgcctcagcctcccaaagtgctgggattgcagacatgagccaccgcgcccggccgagaaattttaaaatgagtcaccaggaataaaatatattaaccaagcgaggtccaccgtttattcagattttcctagtttttgctcaatgcctcctttctgttccaggatcccatccaggataccacattacatttagtcactgtatttccttaggtttttccagtctctggcagtttctccaactttgctcgttcttgatgatcttgacagtttgaaggggcactggttaggtattttgtaatatgttcttcagttggatgtttctgatgtttttctcatggttagactgatgatgagtttgaggaggaagacagcagaagtgaagtcccactctcataccatgtgaagggcccatgccatcagcatggcgtgtcactgttgatgctgaacttgatcaccgctgaggtagtacttatcagctatctccactgtaaagttactccgtttctctttgtttttgtactacttctacctattttaactctagctgtcctgcaagtgctgtctcagggttcactccttctgggtatcttctcttaaatctgaccaacttagtggaatgtttcaccacagacataatttcaaatagcccagttattgagaattgcattaggaaggaaggcgggatgtgctcaccacctcttagctgagtgactccctctgtgattccatcacatctcacaactgtagtcttttacacatgaataaatccccaaaactcttcccagcatttctttctggtcaacagtggagaaaggccttgtgacattgagaagagaagttggccatgtagtcatgagttagcaaattccagtggctgtttctttttttgagacagagtctcactctgtcggcctgactggattacagtggcacgatctcagcttactgtatcctccacctcctgggctcaagcagttctcctgcctcagcctcccaagtagctgggattacaggcatgtgccaccatgcctggctaatttttgtatttttagtagaggcggggtttcaccatgttggtcaggctggtctcaaactcctgacctcaggtaacccgcccactttggcctcccaaagtgctgtgggtccgtgagccaccgcactggaccaacagtggctatttctaagagacctatctctctaaaaaaaaaatctctagaaaaacttgtatttaaaaattatgaaggcaactcgagggagaatataggatgccaacggtgtctcctgaccttagcctttgcgattaggtgctgattgtgtgaaatccggcttgatcatttgctttaaccatactgggcaacattgtccttgcctggaggatgtttatatttattttaccatggcatcaaactttttaggatattaataaagtttggatgtaagatctaatgaaattaagtgttctttatcttaggaaaacatcattttgttttgcatttgcaggcggagttagcatttagatattcaggtttgggactatgaaggtctattctcattctggctaatatataattccttaacttaatggttctgttgttgaaagtgcttgctctagcgctgtattcctacacagtagcctagactattggtcgagggggaggatttatcccttaggaaacacttaacaatttctggagacatttgtggttgtcacaactgggtgggggccacatttgccatcttgtgagtgaaggccagggatgctggtaaacatcctgaaattcacaacctctcacagcaaagagttatctgacccacaatgccaacagtgctagatatgggaaggttaattggttggccacattacctttgcttcttgtctggggcagctttccctagaccctgaggcatgttgtatatatacttaattttgttagatcatcccagagaacatctgcggccctaggtcagcttcacaatgagtctaacttctagatcagtggtttccattgagcctgtgtgaacacgaagatcttttttaatgaccagaatttttagtcttataatttttgagctcttattatttaagaaccgagaaaatcctcggttctcggccttttggctaagatcaagtgaagaactgagaaaatgtgtgatgatgctaacatacatgctatctcgcatgcagtggctgtggatttagtaacatatctcgagtaattttcattttgttgaacataacatttggaaaacagtagtacatatatatgtatatatgtgtgtgagagacccattatttcattattcattctacagatagtacttgggtacacatggatttgatggcccctagcaggaaatatttgtcctcatagagaaaacagcccacagcttagggaccattgctgatgaggatccctttgaaacagagatgacttggagaacactcacatctgtagctgaaacaaacagtctaggaaatagggaagggcatctcagcctcacatacagtgcccacttattaaatttctgcaaatgatgggaggtgctctgttgtggttttcatgcctgttgttaaaggaatctgacagccgaggcatcaggctgctttcttcagccctggtgagagtaggagctctggagtgaagccagtgaatagaactttgccaagattctgaatcttctgggaccatctgtgtctactttttcaaaaagcagattgtgtgaaatgacaggtgggtaggacacagaaggtaatagagatgtgaatgagaagactctaggaagggagagagcaagtacgggtgccagcgggaagagcccagcagaagattgagtgtcctggcagcaggactgagaggatgaggtcacaaatggcttttttctctgggaaggaagccagtggtgtgtgagttgtggcttgggttccagatcttagatcagttttccttacacacaatattaacgttcatattccttccaggaaactatcaagagtaaatggatcaacaggcagccaattggaagagcctcagacatagcaagagggtggcatggagggagaggacatataaccctctctttggcagctgtgcctaccacactctggccttgaagattctgctttggctcccagactagagacccttttgcatctttgccatcagtctttttggaatacagcatcaggcctaaggtcccagatgaaccttaggacagctttcattttgaaaattttggttctcagttcacattttctagctttccattgagtggtgtatcagttagctgttgctgtgtaacaaaacccctctcaaatttagtgacttcaaagaataactttttgtgatttgtgccaagcctctgggttggctaggtgtttctgctagtctgcactcactcatgcatccatcaccgcagtggcagggtgacgggcggagagctggtcaaggatggcctccaatagatccctcatgttcttccttccacttctttacatccttccataaggttcacatgggcatgttttcctggcagtgggtccaggagagaaagaaaaaacatacaagtgcttctacaagctgctgcttatgtccagtttgctgctgaaccattaggaggcgagccccgggaccgtgccccgagtcagcgtgggagggcactgtcacaatgtggagccactgatcccatcactctgccattgctggtgaaatacaaggaagccagctgacagcttccgacgagttgccagatgacgtttcttctgctattctttcatgtttagtagtgtcgctttgtagcaacacgttatgtcttaatctgttttgtggttgagatgcacctgagcaggcatctggactaggtgttttaagtagctaatttttctatctcttggtcattttgtcgtctcacctattgtgatggtgatagagccccaggaatacaaacaccatattccaatacagcatgttcagaagaactgaataaaaggcatacagatttaggaagaaggagaaaaaaattctccatggagaagaacctcctgcttattttaggttttattttattttatttttttgagacagagtcttgctctgtcaccaggctggagtgcagtggcgtgatgttggctcactgcaacctccacttcccaggttcaagcgattatcctgcctcagcctcctgagtagctgggactacaggtgcccaccaccacgcctagataatttttgtatttttagtagagatggggtttcaccgtgttggtcagggtggtctcgatctcctgacctcgtgatccacccgcctcagcctcccagagtgctgggattacaggcgtgagccaccacacccagcagtaattttatttttaagatggaagggtgaatgaaggaatatttgttagcagtgactacacagagttccagtgggctttctctgtgttgaagtaggtaggaaggtgtagggaattggtaaactccgactattttttgttttgtcagtagagcgtgggaaaacggctgattttcaaattgttgtgatgaaacgaatgctggggtatttataggcatgtgtaaataagaagaatatatctttgtcaaaaaacagccaccatgttatttggagcttttttaggtagaataaagtagaactttctaaaagtccgaggaaagatagaggaagattttttaaaaacttgacaccattaatttctgctttgtccaattcatatttatagcatttgcatccatcatctctttaatagttcggttcggtctgagctagttatttctttcacatatttccttttttgttcagtgctaataattacacttttgttctcttactggcaaaacattgcattgtcctcgggaagcattcaaagagactgagcagcaaacgctaattaatcctcgcagtgtgtctccttcattcctttaactgaggcgctgaaatgtctagccacacatttaatgaaatataatttggtgacagagagggtacgaaaactttaattcaagatgccatagcagcttcaataagcctcatatggccatggttgtgaggcagttcaaggctttaaatatccttgagatgcaggtgtggtgactagattatctttctgtgttattctccctttctgacagcagtcatcctgacttgctgtggagaatgagtttatcttgagtggaagttatcctggagtctagggaggcaacctagtttatagcaagtaatcttgggagttacaggcttgtgttttgtttccgtttttgtcagttgtctacacgttgacaagtgacttcatccctgggaatcattattgcttatcaccaattaaacacaatggatattaggtagttcagtgatgagcttaaaagagtttgacaagtttcttggaaagaacgttaggtaactatggatggctccctgtgcaatgtcttaagtctttaaagaatattttaatttattaccttatgtccttaaataggtcccttgaaccaaatttagtatcccagaatatgcattgtcctaagaacttttgcaggatgacatggaaacagatactataattgggaagcctcctaaatatgtgcaggtaggtagtggttataaattatctgtagcgtctcattcattagagactatcttatgagttagtgtgcatgattgatttgtagaaactacagataataagaatgctgtctttgctttaaccggattcatacagtcttctatccagggctggaagttacaagttgccctgctctggaggtccgagtgctgagcagtgagtgactgtagacgtgtggcaggcattcctccctccttgaatcccatgtttaaggtctgtgtttacctctagcccgcgagttccaaaagctatgtctgtctcacttggctttgtttttctagcccttactacagtgactagtaatgaagtaagtgcccaaacacagatgtatgaaataaagagagaaatgaaagggcaaataaggaaactggacgttgcttctctctgttgtacttaaggcctgttgcttcacggcccttccctacaggaggctgtaacactcataacgccgattatgactattgtgagaacaaattggcttccagatctgaacagaatcgcacataagaatcacctaggaagcctgttctggagtctgcccagagctactgaccgagatctccaaagactgagcccggagagctttttattttcaaaaggctcccaagatgattcagatgtaagtgctctgaggattcatgctgggaacagatccagatctgctgtaagccctggctgtgccctggacccacagctcctttccttgcccaggctccccgtgagatgaaggctcgtggaacacatctcatcttcttcatggcaggtaattggaatcaaggagctatagttcccttacctatagtaacatgctgaaaattaaaaccatagttgttcttacatttctttgtatcattaggtgccccactgccaggcctattagcagagacctaatacataattggtgttctggaagaaatggaaggatggatacatgaattctgtgacttaaaaatgaaatccacatggacatacctagatcaggaagaatgttgaatttgtctttacacaaattagcatgaggaaatacttctaccccaaattaataataggtcctgaaatccatttttagactttaatccacttatagatggtgttaagaatgatccttgaaaagggatgtactttagtatttgtctgttgtagaattgttctttaactatcaagtcagtacttcagggttaaacattacaagttcaagatactatctaagattagttaccatctgcagcttaaataatgtgtcccttcccaaactccgtcaaatgaaataaccattaattaaaccccggttcttttccaattggaggaaggctgcaggccaaattatttttgtgatgtatgggacatctgtaatgagtgccgctcaagtgtacctgaagcccttcatcctcagtgcataggactggagcagttgaacagcctctgtcttataaacagattatagtattgttaggattagccagcttttctttggcaatttttttcatctcaagtagtccatattttccaagttcagcacgtagcaagcagtcagtcctgttcttggctgaagtaagcagtctgccttgagtgccctgtgtccttcattctcccgacgtgcacatcccctatgtgttcctcattctccccatgggtcagttaagacctctgtaattacagaacgctccctcaagctagtggagaatgtataatttggaatgtagaggtatctccagaatcatagggcaggagtccagctccattaattgcttttactacatagcagcttgtttcttctcaacttaaaaaaaaaaattaattgtggtagaatgttcataacataaaatttatcatcctaaccattttatatataattcaatagtgttaagtatgttcccattgttgtgcaacccatctttagaacttttttaccttgcgaaactgaaaatctgtacttgctaagcagtgactctctgattccccttcccccacagccccaggcagccatcattctactttgtctctatgagtttgactactctaggtacctcatataagtgaaggcagagagtattttgactttgtgtgacagacttatttcacttggtataatgtctccaaggttcacacatgtggtagcgtgtgtcagaacttcccatttaagactgaagaatatttcactggatgcatagggcacggtgtgtttacctgtttatccctccacagacactaaggttgttcccacctttttgctattgtgaatgatgccgttatgaacgtgggtgtacaagtatctcttcaagaccctgtcttcaattcgtttagatagatactgagaagtattgttagatcatatgataattctatttttaattttttaaggaacctccatactgttttccgtagtggctgcaccattttacattttactttcccactgacagtgcacaagatctccagtttccccatatccatgtcaacgtttgttattttgttatttatttatttattttctaaataatggccatcctaatgtgtgaagatgaacctactctctcattgcggttttaattccattttcctgatcattggtgcaacttagcatcttctcatatgctttttgctcttttgtaaaccttctttggagaaatgtccattcaagtcctttgcctgttttttaatcaggttatttgtttttctcttgttgaattgtaagagttctttatatattctgaatattaaccccttataaaatatataatttgccagtgtctttttcttattccgtaggttgcattttgaccctgttagttttgtcctttgatggcacagaatttttaaattttcatgtggtacattttatctacttttattctcacacttaatatataatctagttacttcttttattttctgttcttttaaaaactttataatgagacattaaggttttgttttgttttgtgagacagagtcttgctctgtcgcccaggctggagtgcagtggcacgtctcggctcactgcgagctctgcctcccgggttcacgcccttctcctgcctcagcctcccaagtagctgccatgcccagctaatttgttctatttttagtagagatgggtttcaccgtgttagccaggatggtcttgatctcctgccctcgtgatccacccacctcggcctcccaaagtgctgggattacaggcgtgagccaccatgcccggccacattaggggttctttttagctgctatccccagtttaattcctctcttccccactactgtgggagtttttctaagctttactgaggtatagtcatatatatgattatatatataaggtatacagcgtgatgctttgatatacatatgtattgggatattattatcaaaattaagtaggcacattcatcacctcacatagttaccattcttgtgtgtgtctgatgagaaccactaagatctacttttctaacaaacttcaaatgtacaatacagtattattaactgcagtcaccacgctgtagcttagatcctcagaacttttgcatcttataactgaaagtttgtaccctttgacgaacatctgtgcctcagccttggcaaccagcattctactctctgtttctaagagttgtacttttttagatttcacatataagtgagatcatacagtatttgtctctgtctgattccactcaggagaatgccctcaggatacatccatgttatcacaaatggagggatgtctttctttccttatggcggaatagtattctaggtgtgctctgcagcctggtggagtggcaggctgtgccctgcagtcgggtgggggaaccctgacaggaccccctgctgggcagggccataggctgggctccgcagttggaccggactgctgtctgggctctctggtcaggtggtcaatggggttgctggttgatctccctgtttgggggtggctgcaggctgtgctctgccgctaggcagtgctgtggtctgaactctgtgccctgggtggtgcaggggggcgtccactgtgttccatagctggtcagggtctctggctgatttcaggctatgctgctctgctaggtggggcttggctttctgcctgaggagagctgtaggctgagccccagggctgagccagactgctggctggggactgatggtgggcagagctggtgactgccctccctggccagatggtgacactggttcagctctgtgggtgcagtgccactggctgcgccttctggtcaggcaactccactggcagggatttggtgccaccactgagatacacgagctagttgctttgagccccatccttctttgttcctagccaaccccaggtggtcttattttcccagtgttcctgtgagacaagacagaaggaggcatcctgggaagtaccctgcaatgctagggaagctggatgtccaccttaggctctctttttccctactggaaaaacatagcttaggggaagtctctttgtctagtgctctaccagactggggaggggcagcatgaccaaaccaaatccctccactcttcttacccttctaatgaaacttttcttggtttctgtggtccaaggggttggttctgcctcatccccttattctgggatttccacaaaggtgttttgtctatagatagttttgctagttggttgttttgtgaggggacgaaagctggggacctcctcttctgccgtctttcttttgttgcctgtccttttcttgttacatccaagaaatcactgctaaatccaacatcgtgaatcttctctcttatgttttattgtaagtgctttcaattttaggtcttaggtttaaatctttgttctgttttgagttaatttttgtatgtggcgtaagataagggtccaccttcattcttttgcatgtggatgtgcagttttcccaatgccatttactagagactgtcctttatccattgaatggtcttggcacctttgtcaaaaatcatttggccctatttgccagggtttatttctgggctttctaatctattacattggtttgtatgcctctctctgtgccactactatgctgttttgattactgtagctctataattcattttgatatcaggaagtgtgggacttcctatcttgttattcttttgcaagattgttttggctttttgaggtaactttaaattccatatggcttttttatttctgcaaaagaaaatgccattaggaattttagcaggattgtattaaatctgtaaatcattttgggaagtattgacatcgtaataataagtcatctgatttgtgaaatgggatgtctttccatttgtgtcttcttttatttctttcagaaatcttttgtagttttcatagtatgagtcgtttgcctcctttcttaagtttatttttaagtattttactctttttaatactattgtaatgaaattgttttcttaatttccttttatttgttgttaatgtgtagaaacacaactgttgttcattgtgttgattttgtttcctatcattttgctaaatgtgtttattctaacaggttttttgtggaatctttagtgtgttctatgtataagatcaattatttttgtttttttgtttttttaaaatatttccttatttttttcttatataagatcgtttatctaagaatagaggtaattttacttcttcctttctgatttgcatgcctgcatagctaatccttggttgactgtttttatttctgaactttaaatagatcatcccattgccttctggattccatagtttctgatgagaagtcattcattcatcttatttgctgttcttttcttgacaagtaattgttttcttactgctttcaagattttgttctttgccatttaacagctttacttttatgtagctgggtgttgatatctttgcatttatccttcttagagtttttgagctgcttacatatacagaccattgttttatattaaatttggtaagtttacttcattatttcttcaaatacttttccagtattctttctgttactttcccttccatcttctatttctattagttgtgtgttggcacacctgttggcatctcatatttttctgagactcttccttttatttctctttgttcttaggattgagtaattgctattagcctgtcttcaagttcagtgattctttttctgcagattaaaatatactgttgagtccctccagtgaatttatttgttattttaccttttaaccaaaattaatacttttaaaataattttcatcttttaatattgtttgttgagacgtagttctcatactttaattctttagaaattatttatcttttaaaatataattaggatagctaatttcaaggtttttttctgtaaagtctagcataccttaggggcagtttctattgattgctttttttcccccgtgtatgctccataccttcctatttctttgcatatttcataaatgttttttaacaactgggcatttgaatgatataatatggcaattttggaaatcagatttcctaccctatgcagaatttactttttatattgcttctgtctgttaagtgaccttcttaagataattctgtaagatatatattctatgtatgtttagcctctgaagtctcttgtcagttagctaagtggtcatctaataactggatacaggtttctttaaattatttgagggataaatctccaagcctttgggaagggacttgtgtgtgtgtgttgaggcttgcctgctatgtgctggcaggcagtttacaaccctccacttgcttgcttagagccagaggtcagtcagaggtgacgtacactgtacgtcaaattgtatgtcagtctgtcatgccagaggtgagatattagagccttttccagtgctttttctggacatgtgcttagccctgtacatgtgtgtgaccttctgaatttccaggaataagtcagagcagttcagaatcccctatggccatgtcattctccagtttttccatttaaggtttttggtctgttgcttgttagccccagttcatattgctgcctcagggaactgtgatattgagcatgtgtcacagattgtttgccctagggatagggctttttgcacagatacaggtcagatttaggtcagatacaggcaagcctaagaatggagcttttgaaggcagcttcttgacagataaaatagtaagaattatctgtactatcccccttagtggcttcaaggctattgtttttcacagctcctgtagttgcaagactgttggttttcaagggtcctgtggaactagtggaaggggtatgggaatagggcaagttaaaacactttatagtttgcttattcttaacaagattcgtctgtttttcttgaataaacagtacttagattgttgcaagcctttgattaatttttagagttccaaaaatgttgatttcacaatttttgtccatgttctcattgattttatgaaggagatgattttcagagacttttattctgccattcctgaggtccttcttttctcagatgacattttgtggttcatagcaaccatagaaacattctgtagttcatcaggtgtggacacagggaagggtcactttgtatagaaaggctatcagggacctatccttgtgattaatctacctgttgcctccctctggagcctcatggaatgtggtgtctgtggattatagaaaacttggcttccttggccacatctccttgaaaattccatcctgccacctcctgtataccaagtggatgtgctgagcactctctgaagtgctaagaaatatgtcagagagcttgctgggacagtctttccctctaaccatgggactggccagtgtgttttgagtttttccagccaatttttggagtaaccaaaactttaggaaggccctgtcagcccacctccctcactggcacactaagcaggaatccccagccccctgttctcccagctcccaggggatgctcttcatctttgctctgtgatcctgcagtggtctccttgtgtgggaatcgtgcaccccactggccatgccatatctgtgtgaagcttattttagctgtcctaatcagagcatgattaaaacaattgatttttaaaactgttgtgtatgtattttatctgtgttattcttgaatattggattcatattaaatagtagtttgccctaattaactttaatactacagatttgtgctttttgaactcagcatgcagatttatgtaaattgcataaagcctttaagctaggagtgtatcatttacatttacaatcccatttatcccatgtctccatatcactgactcttcaaagaaagacaggaactattgggatggacgtacttgattgtttcagtttcactcctgtgcaaaccaaagaacaagtagtaaatgacttttccacataaacacacacattcacacacacacacatagatgcttgtgtgtatatacgtgtgtgtggacctatctttggatgctcatatatgtgcacttagagaatcaaaagcaatatccaggtatcttgaccataagcccaataccctgtctatttttttgagtggcaatttgtgttcccatattgtagtgtgcatatatatatatatatatatatatatgctgtatttttaaactgattttagaattagcgcttaaaatagaaaagacagagcacaaatttggggggggagcagtttaaattttgttttcatacatctggttgtattaaattctctgttcctctttttttttttacccccatttctttgcccttctttcttccctttcctccccaatgttttccgtatctctggcaaagttcatgacataaagggctgtaagagatcagattatgttaccccaaaacacaccactctggcatacagattacattgagctgaaaacagttaagaaaaagacacaagatgagctctctgccttttcccgtctgcctgaaacataaaattttccttgtgaacgtgttcctcccagctctacttccggtaaggagaatttcccagaaaaggagtaacagcctcattactggagatgagaggacaccagaaagggcttacacaaaccagccctaggagccagccatcatctcccatcagtttctcccgacatttgcatatttgccttcatacagtctgccacccctagaagttcaaagtccatttcctttgccatgtcacttctctttagcatttttgtcttttttccaaatagtataaaagcttccaagcacagccattcttatgaagtcctcctcccacccctttctgtgtaaaacttttaacaccaaataaaattatatactttttattccctgtttgtctgcctgttgtcagtttatttcacagacccagtcacagaaccaaagagggtggaggaaagtttttcctttcctacaaggtcagtgtccttttggatagaggtcgaatggatcggttattggaaaagaaacccacagagaaatatgttagaaaggaatttttgcaagcaaagaaccaaacaaacaaatagcaaattgtacgtcatcagtggagactggttttctaccagatgaatgaccctcattaacatgaggaagcatgtatggatattcagtacacatggtcctacttattgataggcatgaatttgattgtacggaactttcctggagcaatgtacgtgttgtgtgtcaggaaaggctctgttcaggaatgcgataggccttgggtgccttgaatgggagagtaatacgtaagcagaccaactgatgggaaaagtctcaatatagaggtaagagagggtggggagactcatgtgaggggtagtttaaaagaggcagtctgttaagcttatgcctggacgtaaatagcagatgaatttggagttagaagaagtttcttggctttcttggtgaggtttgagactcgggttctgtggcggtacagtcttgctaagtcacagatttttgaacccaaaacattcagcccattctccttgtcacaactctcttacctcttttctcatgtaggcttctgtatacagagctagaactggcaagttagagtggaccttttactttaattgtggaaggagggcaagcagcccctgagaaaataagagtctctaacaaaatgcacttataccctccagacctgtctactttaccagaatgggtgtgccgggatacagaataccctagtaccacaaaataacttcaactgcaaacaattaaactagtaagtatttaaggaacatttgctatgtgccagaaactgcttagtgctggatatgtattagtcgttgtaagtagatgtcggaggaggaggaagagggtatatatcaccactgtgtgtacgaaaaaaatgatataaagagttgaaccgagtggcatgatgagaaaaacttctgcttggatatcattgtatgaaagggcgatgcctggaccttactggccacaagttagcagctatctgcccccatgaatggatcataaaagatgtcttccaatgtgctgacatcatgtagccacaggaccaatgctggaagaatttcctgtggcgttattatcctgtgtaattaataagacactattaatcaacagcttgactcacagattctgtgacttgcatccaaagcccactactggatgtctcaagtctttgccatctctcactttatttcaatagcctcctagtttgttcctgcctcaggatccttccgcttgctgttcatctgccttgaatgctattcctaagatttttccatggcctggtgccccactttatttagttggtttctcaaatgccatctcccaagaaaggtcctcttcatccaaaatagcccccctccccccatctctccaattactgccgaaccccttacgatactttgactttctgcatagcacgtatcactacctttctttccatatatacatttagcttctttgtctgttcattgtttgtaatgtctattctattataatataagcatcattttgggcacagacttcatctgccaaacatatactaggtatccagtaaatccgatcaatgaattcatacagtataacctagcaaggaatatcatcaatgaaaaaaagaaaagacacaaaagacctaaaagaaataagaagacaggccaggcatggtggctcacgcctgtaatcccagcactttgggaggccgagatgggcagatcacaaagtcaggagatcgagaccatcctggctaacacgatgaaaccccgtctctactacaaatacaaaaaaattagccaggcgtggtggcgggtgcctgtagtctcagctactcgggaggctgaggcaggagaatggcgtgaacccgggaggtggaggttgcagtgagcggagatcacaccaatgcactccagcctgggcgacagagtgagactccatctcaaaaaaacaaacaaacaaaaaaaaacaaaaagaaaaagaaaaacaatttaaaaatagaaaacaaacaaaaatgtatagtatatccaaaataaagaactgctttttttgtggttatgcttttctttttccctcacgaaggccaaatctcctgtgtgcttcaatagaaatcagtgatgagaaaaaagtagcaggtatcagattaaaccggcctccatgtgatgatcatctgttagctttagtattgtctcaaatgaaaaactcacaaaacactccaagttccctgccattgctgaatttaatctttggaatgttttgaaccccgtgcatgaattatatcaattttacttagggaaggtcctgtggtatctcaaagtcacttagctcagtttctctaggttttgtgggaatattaccctttaggtatgtaaataatatttatttcaaatcaaaatcataagtgaaatcctaaagcattgctattaaatgtctaggctaaaatgaagatacctgcttttgccactactattttgaaatgtagactcacaagaagttgtaaaaataatgcacagaatcctataaaaccttcaccccacttctgccagtggtgaaatgttgcataactggagtgtggcataaagactgagaaactgacatttatataatactgttaactagaatagaaacgttactcagttttcactggtttcagtatgccctcatttgcatgtgtgtgtgtgtgtgtaaataattctaaattctatacaatttgatcctacgcatagattcatttaatcgcctccacaatcaagatgtgcaactgatccgccatgacagaggaactccctcgagcgacccctataaaactcccctgttgcaccccctcccacctcattgcccctgccgtttaacattgttttcaaatgtctagccaatataattagccaagataagtagtagtaacactattggcaaagaaaagtgagaatgaaacatatcattatttgcaaatgatatgtttatctcttgagaaaaatccaaaataatggattgaaactattaatttgagattttctgtataattatgattaagaacatacactctgaagcctgctatgtgggtttggatcccagctccaccacagactagctgtcagtcctctgggaaatcacttaacctctctgtagaggtttccctcatctgtaaagcagggctagtaagagtacctacctcactgagttgagaggattaaagaatataatacaggcatacctctaagatattgtgggtttgctccagactaccccaatttgcaaatattgcaataagtgagtcacatgaattttttggtttccagtgcatataaaagttatgtttatactatagtttattaagtgtgcaatagcattatgtctaaaaatttacataccttaattcaaaaatactttattttaaaatataatagcaatcacctgagccttcagcaagtctttttgatggtacagggtcttacctcattggtgatggctgctgactgatcagtctgatggttgctgaagggtggggtgactgtggcaacttcttaaaataagacaacagtgaagtttgccccatcaattgatgtcttcctttcacaaaagatttctctgtaatgtgcactgcttgctgctcttttacccatagtagaacgtcttccaaaattggagtcactcctctcaaatcctgctgctgctttatcaactaagagtatgtaatgttctaaatcctttgttgtcatgtgaacaaagttcagagtgcctccaccaggagtaggttccatcttaacacatcattttctttgcttatccataagaaatacctcatcattggttacagtttattatgagattgtagcaattcagtcatgtcttcagactccactgctaattctagttctcttgccgtttctaccacatctgcacttacttcttccactgcaatgctgaacccctcaaactcacccatgaggggtggagtcagcttctcccaaactcctgttaatgttgatattttgacctcctctcatgaatcccgaatgttcttgatggcatctagaatgatgaatgcttttcagaaggtttttgattgacttttccaagaccatcagaggagtcatcatccgtggcagctatagacttacaaaatgcatttcttaaatagtaagacgtgaaagtcaaatttactccttgattcataggctgcagaatggatgctgtggcatgaaaccaacattcatctccatgagaactcttgggtaaccaggtgcatgatgtaatatataaattaggaaactaggagagaaaaatccaggcatgataatagaaaattttgcaaacagtgtgacacagaactacctaggtaaatagatggaaaaagtcattctcactggtaattagaaatgtattttataccataaccaacatttagtttctactacccaataggcaagtctttagaaaataatgacataacaaccactgtctgtgtgtacttgtaagggtggagtaacatgtttgtgctattttcttgcaatatttattgaaggcattcaaagtgtatgtaacattctgacagttaaattttaaagaattctgagaattgattagatgcactgtggcttttgtttactaagattttatttatagtcattcttttatttagcaaatgctgtcgtgggccttgtctatgcaggacagcatgctaagcactaggaatagagtagtgatgaaaacaggaagacaagcattaaataaatcatggggcaaagggaaataatcactagtgttgaaagaggaagtattgtactaggtagctgagggcctgtaactagaggatttaacttagcctggggtgtgtgtgtgtgtgtgtgtatggtgaggggttttcactgaagagttgatgaatgttgaaacgcagaggagtggtaagaggcagggaggagggaagggaggattaaggtgtgaggtaaccagcagcagaccctgtacagggaggctggaggctggagcagagagaggacatgacggggtgaaaggtaactctggagatataggaaggggtcacagcaccttttaggaaaatctaagattttagccaggaaactgatacgaaaaataatgttttcaagggagatttagtaatacaattataatgatagaatattagtatatatttgattatactgtatatcacagttactatatgtgttatagtatgtatcatgatcattatatactatataaccattaaatgatattttaatgataaatgatgacataatagttaatgctataatattaaacgttgaaagcagggtacaaaacagcatgtttggtttaatcctaattttgaaaaggaaaaatgatgtatctaacatacactgaactctaaattgtttttacggtgatttttctgtgtagcaggatagaggctgcttttttatagttcctttatttcccggattctctaaaaatgaataggtgttactgtttacttagaaaaattgtactatttgagaaaaacagatttagtttatcttggaacatttcattgaatagcctgtatatattataacgggcttatggaataatactgaaaaatatccattaaatggcgagtagtcaggtccagtgttggcttttgtccctgtgaggtctccttcactgtgtatgtttccattaaggacccttaaggttcagagtttttgttgaaatacactattcagtcacatggatctgggaggaaaactgaaaccagctggccttgggcagttgctttagaaattctaatacatgttcagtttcctcatgcttcatgtattgaactgtaaaaattctcttttggttaccatcacacaatcacagggcaaattaaatctcatccctgtttcatttgactgggaacaaaaaacaaatcttaaaatttaagagtacttggtacaaccctataattactatacataaatccaaggtttcaggtaccgaatgcttttgttttgagattacagcatcaccgttgttcaggtaaatatgattcatcctgtccagacaattttttgttgttgttctacaggaattcattgacaataataacattctagtttgtggtaggtttcagtatactaggaaaaaaaatcaaccaaccaaccaacccaactcacacttagatggagacatgccagtaatgcgaatattttcaacagagcatattctcactattctttgccttcagaatttaatcagatgatataatagataagtacatgaaagaaggttaaggagaacatcacctcttttttttttcttttgagagggagtctcgctctgtcacctaggctggagtgcagtggcataatctctgctcactgcaacctccgcctcctggtttcaagcaattctcctgcctcagccttctgagtagctgggactacaggtgtgtgccaccacgcccagctaatttttttcttttttgaaatggagtctcgccctgtcacccaggctggagtgcaatggcacgatctcagctcactgcaacctctgcctcccaggttcaagcaattcccctgcctcagcctcctgagtagctgggattacaggcgtgtaccaccacgcctggctaattttttgtatctttagtagagacagggtttcaccatgttatccaggctggtctcgaactcctgacctcgtgatccgcccgccttggcctcccaaagtgctgggattagaggtgtgagccaccgcgcccagccgaacatcacctcttaatctgatgtaagaaaagtaatcaaagttctgatacaaggatagaagtgactgctgcccttcagcctcttgcccctgtgccagctagctcatagttaaaccttggtgcagagagagagagaaagcacctcgtgggctggcattctagtgttctggtctcctgtattctaatggtagtcatggaccctacaaatcccaaggcagaagctgtcttggtgtaaaatagcagcaataaaaattaatttagactgagtcagtactgtaaagaagaaacaaaaatgaaaacaaaatctcacctttcccagctgtgtgaatcaatataaattggttcaacatgagctcttgttagaatctgggtgtttttcacactttgtaatacaaagctcacataggctttacagatgatggttaaaacgtgtgtgttagggtccaataagtgacttctttgcctagcagaaaattcacctcatttattgaacaaaattggcaaaaaatgtttcactctgaatgtttggttattttgactggttcaattaaaaatcacttcttcgtatttgtttatcattgcaaaagaggactggagagttagaacttacatctctaaaagaaggtgtttgatttaatcagaaaagtgactatttggagaacaaggactgggaaagaggtgttaattgcattggagaagagtggcaaggaaactaaaccatttaatttcgaagtctactatcctgtgctcaatccacaagcaggtaaagaatgtaaatttataatttatatgcactgccttctataagtaatgttagagaatcaactcttcagtgatacttgttaaagaccagtaaggaagactttatttaggaccattgcaataggtataggaacagcgggattttgcagtgggcgagagagattgagagggattgcagagagagattgagttcaactccaaaaacagcataggccagtgggaattcatagccaaggagtagtgtgggggtcagcggatggaaaatgagcaagaggaagcatcagcgctctgactgaactgatttaactgagttctttgctcaaattggattttccaaagaaatatgcagataagtctaggagaaggttcagaagccccactgaagtttggccatgcaaagaatctttgtcagtaaatactagtgaaataaatgaaatctgatagagacaaataggatacgacaatctctaatcctgccatgtctttacacctttctcttttgcactgatcctgcttcagttgtgaaactgtgcctggatgtagcgctaacagcacagaagaggtatatgtcaagcctgtcctctttatgcgactgttttacctccctgcgggtgcagaatctttaccttttgagaactgtctttttccttcccaagagtgggcctgccccccaccatcagcaataccttcgagctccaccctgcagccactgtcacaaaggaaggctggggaccttcttgctgttgttggtcccactcttcctccagtcgctgtgtggctaccagcctgagggctcttgctcctggcattacaggacattcaagcccttactaaaataaaactgacattttagcctgtgttttttatgagtatttcagtcttctgaaggtctgatgatccttctcaaggtatcaaataagagagctaataaactaggatgatgcccctctttacttcctgtcctgtaaaccttgaagtcagcacctcccttcatgaatccttgctgctgcgtcgccctctccaagatgctgcctatggcaaactaaatgtgagagatagaaccagaggacaagatagaagaacttcggcggggggtggggggaggagggaggagggaggaatggggagcagggacagcactctggagagtggtccagtgcctccaatgcttcaaagcctggccatcccgtcattgcccagtaaggatgctttttacaggcctggatcatggtcagggacaattctgatagccacaccgacttcctcttcaaaggtcctttttctcaaaagaaaccatttagcctttcagggactgcagtaccgagctctgtgatccagcacagctgacagatgcggaagggggttccagtcaaggaggcttccaaccagtgccctgaggtcaccttgcctggtgattgacacccttgggctccagatagccctccccttccatttcctctgaggaccgctcccttctgaaagccctgggaaactggttttctacttcctttctttttctcattccgtgatgaaatttgtgtggttatatctaatattttgaaacattacaaacaatggggaagagacgaaagatagtgtttcatgggaggtgtatttgagataggcagaagaggaaacaagctttcagccaatgggaaaagtactcctttggccttctatgattgacatttcagaacaagcttttgggagaaagttaaccaataaacactttctaagttactgcctgtattattgaacgtatattgcacttttcgttttcatcttgcacaacctgataggtgagcctgaaattggctctgttaactgttctccattagcttttattcactcttattagggactgcagtctatgtaatgaatttattggatcaattatttgtatcttaatgcatgtttaggacttcaaagacccctttcttttgatttttttcctcatttaaatagttttctgaacatcacagttttggtgccttcactttgatacataattactattctgcaagtgagcttaatacttttaatgccatctgacctcaagattttaatagaattaaatgcaaacaagatgaggaaagaagagtcatggggaaacttgacttgttactgagctttgggaaaaactttaaactcttggtcaaagtgattttctgttaagaaatcaaaaacgtgccagcagatgcctttaaagacaacatttatagaaattatttttttttgagagtttgattttagtattctagcatggatttacgtcatctgatactggatagtataatcttttttcctcatcctctaaccctcaattcttaaaactccgtgaatccatttctttctttgcatttttattattgtgcatcatgagactcatcttcaaaggcaagagccttattattgggaaacaattgtgtagtaaatgcttatttgttatttctctctatagttttttctctatatagtatagtagtatctctattatcttaacacagtcttggaaatacccacagtatttgtaataaatgtataataagtatgtcaaatttattttctatctaaattttgttgttatctcagtcttaaattccatccctcccaaattgctatttctccaccctgaaagataaagggtagcccacgttgatactactcggtgtctgcccaatcacaggaaggcactgagatctttcaatgtactgccatcacatcactaagatgggtgaggtggggatcaaaaattgagagaactaggatggcggcaatattttcaggaatggtcattaataagctagttatgagattgtcatatttaaatttcatgactgtttttcaacctgaatgtatggaaataaaaattataaaccctcttcattttatgaaccttatttttgaatttccctggaatctattgctattaaagccattaattccttactgtaaaacgtcactatcaagaaaaagctaaaaacatcaccatcagtattagagatgcaagcatgcaggtttcctaaactgaagagacattgccccttaatgagcctttacaaaacaagagaagatcatttttgagcttaatattagaaccaaaaagagaaatgcaaggcagtagcccattgcaagaaagaaaacaggaatgcactcagccaggttgcagtcacccccagacaggaaggttcttgccgtttattgcagttgcctctgattcctccctcgaagtctgggagccttaagggtgaacagcctacaaccaagccacgttctcccgacaattctgtaaacctgtttatcacaggcaaattttcaggtgtctgactatagtgggattttttattatcaatgaaatgcatgaagtgacaggccttggttggtgaagtggcttttgtagactgaatatggctgagtatgtacagccaataatacattttaaaaggcatgtttccacgtagctagaattgaatacttggtattactgtccttattttcttctttttactgtatttgataaaatacgtccatgagaattcagcattctctataaaataaaattttgaaggaaagtagaatgaaaaataattaatgatttgatgaggaaaatctaaaagaaatgtgttatttctaggcaggtcctcttggctttccattcaggacttctgcccaaaccatgaaagcaaatgactaggccatatggaaattggttgtaaaagatgttttagattagccagtcactccaggagcctttgatgttatgcaggctaatgaagttggctcttggagaggtttttattcagctgaactgaatttctgagagattcatattacattttcatacagttgtcttgcttcataccccagggatttattaagttataattgaatattgtgtttttaagaaagtttcttaatgtattacacccttcagcaaattttgcttggtattgttttgtcaagataatttaattttacattggctaatttagcccatattaatatttcccctgaaattcaggtaacttagcaaactgttacaggtggtgagaaagaaaactcttttattgaagcattaaaatgttacattattgtgaggtgaaatcttttatcagcctttggagatattctatcaaggtcagtaacattgtatctgtcaaagaaaagttttactccaaaagttgattctcctttcctcagtatcccctgttccctgcattctccagtgttcctccttcctcccatctcttcctgtcccagggaagttctccccggattgctgactggagaaacagcatgacgtggtttctaagtaaggggaaggggggtggggggcggagtactcccttgtcagtggtaacaataggctgtgaataattcagacatgatgaaagaaagtctcatttgacaagatagtacccgattcactaaacagctagtgtggaaataatgatggcgttagttaggggaatacaagaagttcaaaagttttggtggttttgaaagggaatcgcagcacaggggccttcaccagcttcccttctaatgttcgtttgttacgcctggagtttcttacattactgattacgtctcacttgggcgatgttttatctaatttctggaaaggctttgttttataaagtgggcttgcttctgtggaaataaacaaagaccaaatgagaacaaacagaggctatttattcagagcttgctataccaagggagccatcctttgctcttggcagagactcaaaggcagccagaggggtgggaaagcttccaagtgaaagaaggaggcttccagctcactctgattggaggctgttggcctggggaagccggaagtgggcttactagaaagggggcgtgttgtgtggttggtgtggggagcgtatttggcttcctctgattggccttgagttggaaagggttggggagcgaaaatagggacgactcagtcactggccaagtgctgactgttcggtgcccatgactgcagaggttgtgttttggcttcctgggtttctcacgcgggtgggagttgacatacacggtctggccattgtctgtctgcatagtccgcctcactggatactgagaaatttgcctggcagtgtatgaactggataaacttgagtgggaagtctaaaattatgaaggatatttggacagaatacttaatttttttaattcgtaccccacactattcactctttatgaggaacagagtctgataaccacctccacagccaaaatacagaacgtcatctcaaaaaagttctccgtgtcgttcatttgtaaccaactccttccccccaacccctcaccccaaacaaacgctgataggtttgtttgcccctgtaattttgttattttcagaatatcacataaatggctacatgcagtatggagctttttgaacctgagtcccttcacgtggtatagtgcatctgacacatgcatgttgttgcatgttttgaatctgactcctttcacatggcatagtgcgtgtgacacatgcatgttgttgcatgttttgaatctgactcacatggcatagcacgtgtgacacatgtatatcgttttaactctgactcctttcacatggcatagcacgtgtgacacatgcatatctttgatgttttgaccctgactcctttcacatggcatagcacatgtgacatatgtatatcgtggttttaaatctgactcctttcacatggcatagcacatgtgacacatgcatatcattgatgttttgaacctgactcctttcacatggcatagcacatgtgacacatgcatatcattgatgttttgaacctgactcctttcacatggcatagcacctgtgacacatgcatatctttgatgctttgaccctgagtcctttcacatggcatagcacgtgtgacacatgcatatctttgatgttttgaccctgactcctttcacatggcatagcacgtgtgacacatgcataccattgatgttttgaacctgactcctttcacatggcatagcacatgtgacacatgcatatcattgatgttttgaacctgactcctttcacatggcatagcacatgtgacacatgtatatcgttgttttaaatctgactcctttcacatggcattgtgcgtgtgagacatgtgtgtcattgcatgtgtgtcaatagcatcactagtttattccttttttttttttaaagaaaatgctcaactttatatttcatttcaacaatttgctcctaatgcccttttcctgccccaggatcctatctaagaccttgtgcgtgtagtcatgtcttcttggtctcctccaatctgtgaccatttttactctttctgtactgtctacaactttgacccttttgaagagtcctcgtcaggcatctttgggtcgtgtccctatatttgggtgtatctgttgtttcctcatgcttagactggggttatggattttggggaagaatcccacaggggtaaaggacccttttgatgatatcatatcgggggcaccggtcatcaccatgacttattcctggcgatgcgaaccttgaccctttggtgagggtggtgacagttagggttttccactataaagttaccatttttttttccgtatcctattcttgaaaggttttcttttctcaccagctgaatatgtggtgtttttccatactgattctccaactctctgacaccaactgggtgtcctgcaattcaactgaattacaaaaccaactcccagcgttagcacagaccccacacattgagggctcaaaactacccccacttcagatcccaggtgtcctcatatacatctgacagactttgaatcggggttcccaaaaccccctccttgggctcagtaactcactagaacagctcacagaactactcaggaagtcactttacttacttcctttttttgagacaaggtctctctctgtcactcaactcctggtctcaagcgatcctcccttgtcagcctcctgagtagctgggacctaaggtgctaccatgcctggttaattttatttaaaattatttttaatagagatggggtctcactgtgttgcctaggctggtctcaaactcctggcctcaagcagtcctcccactttggcctcccaaagtgctgggactacaggtgtgagtcaccaggcctgaccaggaagtcactttactttctatgaccaatttattataaaggatacaactcaggaatagcgaaattgaggagatgcatagggcaggtgtgggggagggtgcagtactcccaagctctctccaggcgcaaggtgccccgtcctcccagtacctctgtgtgtccaacaccccggaggctcttccaaccccattgctggagggttttcatggaaggttcattatagaagcatgactgattaaatcgttggtcctaggtgattgaactcaaccttcaggccccctcccctcccaggagactggggagtggggctgaaagttccaagtttctaatcaaggcttggtctttctggtgaccagcacccatcctgaagctatctaggggcctgccaagagttgccttgttagaacaaaagactcctataacccttatcactcatgaaattccatacgttttagtagctctgtgccaggaactgggcacaaagaccaaacgtatctttctcattataccacagttccttagaagcaagttgtcaagtccagcccacagtcaagcagagggcagttaagttccactctgcagggaagagtatcaaagaattcgtgggcatatgttaaaaccgccactgtacttaataaatattctgagggatatactttgaggcaatgcaaatatctgtttttcctaaactttcagccacccattttagcattcggcagtggctcttgcttacagcatttctatcgtaatgttctaacggtgatttttctcatttccctcattcttcctacatttgttttttggaatttttctgtaaaggaaatctgtcccatctcccatttatatattcaatcatttatttatatcattttggatatatgaatatttatgttattctctgggttataatcttctatttaggttggtgcaaaaataatggtagtttttgtcattaacactaatgcgaaactgtaattatttttgtaccaacctaatagatttaatttgtaggtcaaatggctcctactgtggccttgagagctttctccagttggccactgtgtttgtttgacgtgctcttatctttttcttttcttggcacttactctgcactgtgagatcctccagccttgttctgtgtgtcacctgcacccgcccagagtcagccatttctttaagaaccctggtgccttttatggggaaataggattagaaaccaagactgaagcatggagtgtgcttgtagcccctgtgctgtcacatcctctaggcctctcagtggacccagctaggaaacaggtatatgtattccaacccatgtatacacacaagtctctgttcctgtctgtatccatctgtatctatttaaaaataaccgtgagtttctacaagtatttctgagtctaatccagtaccatggggttcattctgttttcctcccttggttacttgtaatttatttctctgacagggagaaacctgactcgcattatccacagtttatttaggtgttcaatggtagcatttgtgtaaactacccttaggattgctgacgtgtatcctgcgagaaacaaatttaccaaccaaaatacaggctttacctatggctcatttttcctttatcctgcaataatcagtcaaatcactgtttcccaaggggtttggatcataattctgaaagaaatgctgtaaaatgctgtactttctgaagtctaaatcccaaaagatcaatctctaaatagaaagtgggaatgtttaatagggaatgctcatgttggtggctattgaatcatagaaacatttttaaaagagcagtgctatatagaaaataaatgtgtatgtattttctgaggagagccatgtcctataagaaaaaaagtagctgtgcatcctgatgcatgactttaaagtattagttaatgatggtgaaagccagcgactgtggactgtctccctgcagttacccataatctgtccttgaaatacgcttttatcatatgttgaattttctttttagttttctctgttttttctttttaaatttttttcattattattattattattattattattatttggaggcggaattttgctcttgtcgcccaggctggagtgcagccttagctcattgcaacctccacctcccgggttcaggcgattcttctgcctcagcctcctgagtagctgggactacaggggcatgccaccatgcctggctaattttttgtatttttagcagagacggggtttcaccatgttggccaggctggtctcgaactcctgacctcaggtgatccacccacctgggcctcccaaagtgctgggattacaggtgtgagccactgtgcccaggcttttccccattattttaagttgtccgcattcttttgttttacaatttgctgtgctatatatttccttttcccatcatttccaatactgggggtataaattttgtagagaccttgagagggctctgatttgttttatgtatttttttttcaaatttgactgcacaaaagagcattatcataacgttgactgtttacgcattgtgcatgtttgtaaaaacatggaaaattcctccataaataaagagatgtcttttttgcatatctgcatttgtgaaagataaaatttctcgaggtctcggccatttgggtggctgcatatacagtgatgatccagtgcagtttttgatcaatttcaacagaagactcaggttgtccgtcatggtatttcagatgaccacagttacaaagctgggtgcacacaattaccaaccacagcaatgtgcatgcatacattccccttgttgacctgttacctgtttctttctgaatacagtttgctcatagctcttattcttgtgtgactgtcattagtatacctgaatgtttatccttgcaaaaaatgtatgttattattgttcattttattgcacaaagtgacctatgaagtgttcggtcacgtttttatgtttgccaaataaatctctttttgtacatgtaaataaatgtcttttaaggaattaaaacattttcctcagaataatagttttggaataattttgatctttcaggattgtgatttgggggacttttagacttcagggattttgatcttttgggatttctgcatttggatgtggtgtttgggattgtgtcttttgggatgataaccggctcctggcaaccactgatctgtttctgacttttccgtttttgcctttctcagtaggcaatatcattaggatcatacggcacgtagccatctgggtgtttaacttagcagaaagcatttaagatctatttatgctgttgtgtgaatcaacagttcattccttttaacgctgagtagtgaagtatttcattgtctggaatgtatcacaatttgttgaactcttcatctgttgaagaatgttttggttgttgggatggttatgaattaagctgctatgagcatttgcctacatgtaattttttgggaacttacattttcaattcacttgagttagatacgtaggagtgggtcagataagtatgtgtgtaatttttatgtaaagatttgtaaatattttgtgaatctgtaacagaatgagtagcactttttccaggtgagcgtgtggattgccaagttgcatagagctttttaagttgactgatttttttctaatttcattgaaaaatccagtagttttttttttatcaagccccccctccttttttttttttttttttttgctcttgctgatgatctatttagttattaggtggcaactcatgtcaacaagtgaattcacatgccatttcatcttttcttgccttaacacggtgaaaccccatctctactaaaaatacaaaaacttagccaggcgtggtggtgggcacctgtagtcccagttactcggaaggctgaggcaggagaatggcctgaacccgggaggcggagcttgcagtgagccgagatcatgccactgcactccagcctgggcgacagagtgagactccatctcaaaaaaaaaaaaaataataataataggcctaatcattgtacaaggatgaaggtagggaaaaaaagaaataggaagaagcaaaggcagaaaacatctaggatgctggagcgcagagaacacaggaatgactcaggagttttgatacaagtttgattagagaaaatatgcaagtactgcagtgactaagtagcagattatagttatgaaatcatgcaggacaggaacgctgaggttaaatacaaactgacaacaaaaatcataagaataatatgtaaaagcaagtatgaagcctttgtatttgcttgcgacttgcagtttgaatagcaaaatgatctttcacatcaggctcagtgtgttaaatccagccttaggcaagaataagcaaatattgtttccatatgacaagcctttagctgctagtgaaatgctttctttgtagtgaactgtaggcacaaactatcagcagatgactgtgtatctgagcatatctttaaccacagttagctacaaattatttatagaggttaaataaatgtttacactgaatgattcaggaatgagcacataacagcggtttgggggattatatttctgctattgaaatctaaatactcctacaacaatcctttcagcttagatccgtggtttctagttgaggaagcagtacctcctatgggacattctgggtctcctatgggacgtactgggtgttctgtgggcatttttggtggtcctgatgatggcatttgtggagaggacagaaaacagactgcacctgctgcagcgcttggatagtcctgcaggatgaagggcggctctgcgccctcatagatctcctgcacgaccctctagatgtttacgtaggtaaaagcaaaaaacaacaacaaaaaactagtacttcatttttcttaaacatgcatggtatttttgtggtatttttaactttcaccgatacttgctgcaaatgcaattactgagtaaattgagggaaaattgtgctttggttggttgggtacttttagcgatagccattctccatttcagcaatgcccttgtggtgtttgagcggccagtgcaacacctgtgaatcagtcttcatttgtagctgtggcatgcaaatatttaacagaggggatgtaacattcactgtaatagacttaaaaccaaatatgttttaattagatgaagaccatgaagtgtgaagagaccactgacttttactaatagtttttaaaaaatcactgtcatttatgtagtttttgtttccgtagtatgacagtatgaatatgttataaaatcacacatttaaatgattgatttttgaggttgcctacaggtttttagtcttatgctgatgtgtgcacaagtctacaacataactgtgttctagcctcctggttctttccctcttaagcatcagagactggatcttttgcttggcacgtgataggaattcaagataggagagtaattttctgggatcctttttcagtaccctatcctgtgtcaacataggacattattttgacacttcacttaaaaataagcctccttattcctgagaaagccataaatttctttttctttaataatgagtaatttgtcttggataaactgtctttaataaatttttttgtcttgtcatttacaaataagcatagtcttattttttctaatcttagtacttttgattgtttaatatttcagtttttaaaatcaaggcataacttacatgtagcaaaatacagaagtcttaagcatacaactcgatcatttttttcaacattttattataaacattttcatacgtacagaaaagccaaaagaattgtaaagtgaacatccatatactcaccacctagattctgcaacgaacattttgctatatttacttcatcgcatctatacatcttcatgtccctccattcttccaccagtccatcttatttgatacatttcaaagctgcaggcatcagtacacgttgcccctaaacacttcaccatgcatatcattagagtttcatgtgtttacttgttaagctaaaatttgcacacaataaaatggataaatattaaacataaaatattgaacataaaacacatatttttattattcctttcacatgagattcatagatgccagaataacagttacctttttaggggtggtggtaagaatgcaaatattttatatctctatctaggtggtgttttcatgagtgtatagtttaaaattcattcatgacatattcatacattagaatagtatttactgataataagcaacaaactaacatataaatgctcctcacatgattttacgaatgtatgcatccgtgtcctataagtccattaaggtatgaaatatcactgccactgttacctcagacagttctctcatgccccttcccagtcaaacctaaccctaacccaaaaggaaaccacaattttgaaaatttttgccatagaaaatacagccttggtatggggatttgtggatggtctggaaacccttcaggggaccctgggggtcaaagctatgagtagtattgttataatactcgtatttttataattctactttggcattttcccttttctatctcattctgttgtgaatggggattttcagatgctacagtaatttcttgcattgtaatatttttgctcctaggttctgtatttaagggagattgatgagctgaggaaagaatgaatgctttaaaacttgatctaaggcggtattctccatcctactggacaaaataccccccttttttacaacaaatatttaatcatggccctattattctcctgcgatgcaattcatagattaaaataaccatcctaggccgggcacagtgactcatgcctgtaatcccaacactttgggaggccgaggcgggtggatcacctgagctcaggagttcgagaccagcctgaccaacatggtgaaatcccgcctctactaataatacaaaaattagctgggcatggtggcccttgtaatcccagctaattgggaggctgaggcaagagaattgctggaatccgagaagcagaggttgcagcgagcagggattgcgccaccgcactctagcctgggcgacagagtgagactctgtctcaaaaaataaaaaaatctaaaaaaaaataatcatcctaaacatacaatttaaaaaaaatcaatataatattctagctttgatataaaggagacataaaagtaattcataatgaatatgtattttaatatgtaaattgaattcagaaacagataggaaaatccagctgtcttttattaagctaaacattaaaggcatttttaaaaataaaaagtgccatacttttactttgttttggaaagtattatttttcataaaacatgttatatagtctaatatgtaaggtttattgtcatttttaatgaattatgaatctcaagtatctcagtataaaatgtaatatggtaagtgtacatatataacaacataaaacaaaactttttggttttcttttaataattatagtttttaaactgtataaggatactgagagcaaaaaatttgagaatcactggtttagcttgtactagaacaatataagtgaattatatagtgtgtggctttaaaaaaaaatctagtgcttattttactcaggataatgtttctgagatgcatccatatattagtagtttgttccttattatcaataaacagtattccattgtatgaatataccaccaatgaattttaaaatatatgcccatgaaaataccatccagatagggaaatacagtatttgcatccttaccaccttgcccctaaaggtgactgttattctccatctaagaatctcacatgcaaggaaacagagtttgttcttttatgtctgacttccttggctcaacgttatgcttgtaagattcacctgcgctgtggtgaatggtttgttttctttccttttaacgctagttctcgttgtagtgtccacctgtatctgtgctcttttgttctcctgtattttcacatggaatagcttttaatcttctactatttctacatccagacatactcattatacgaaggtggaagtatctaacaacttcattatgctttcagtgtagtcagccatcagaatttacatattgaaatgcaaagtcattatgaattgccttctttggtttctcctttacatcactgttagggcattatattgattttttttaaaaattctatgtaaaaggctggctgttttatctggattctatttcaggggattaaaggaggcattattaaatattagctgttaaaaagcaagggaatattgagtccagcaggattcagactacctccttagatcatgttttagagtatttattcccttctgatgtcaccatcctccatgagatacagaacctaggagcaataacattgtaatacaaagaattgatcacttgcttcacaagaacatgcttttaataagtgtatcatttattttacaaatggcgttttcccaagagatgacatttctggccggttgaccaaaatttttggtgatgagtagaaacttcatgtttgaggattgacatcttgaattttttgtgcaaaatttgaatattaatttatagaggacattattcttatctccacagtatctcatttgcattagttaatattaaataagtaaagtagttgtccatttttctcagtcttaacactttctaaattcatgcctcaagaagttcttttattccaagaaaatgatccaaacgttattaattgcaaagtgtactcacttatttttcacttcggggaaaaaagcagaatgataactaaaaatgaggtctctgaagttagactaccttgatttttaatccagctcccctacaccagtcacttccttgtatgcctcagttttcttatctagcaaatggggtaattgtacctacttaatactactaagtgtacctggttaatatggtttttgtagttattagagggaataatataacgtgagatacttagagcagtacttttagtaaggatttagtaaataagctttagtaaggacatgcaagatctgtaaagaatagcttttggttattatgggctattatgacttcagaaataataaatataaagctaatattaatactagctgttacaactttagaaataggaacaaatgatgagattagggcttgttcctttgaattttttggaattagttttcttagcagtcaacaagtatatatggactattagatgtggatactttggaattaaagatataaatgagtaattaatactccttagagtgagctcatggcattgtcactttaacaatatgcccaaaagtggttctatttaaattccacacaagagaagtagcaatgttatatagagcattgggttttcgtagctatttggatttggaaattaggagcatattagtaatcttagtaggacaagccagaggaatgaagagctaggaaggaagtagggattgtgtatccagctgggagaagtttgaatgagcatggaatagaatgggcatcttggaggagatccttctctaaggcatctagaggagaaggcagtgaacttcacacactggagggctgactcctggaggtgactatggagggaggggtgggccctcaggtagagtcagaagaccactcgtggctgcagagggacacttggactctgggactgcctttggtgagttgacccagggactaaggggagaaagtttgaaattgtgtctaaggggattgagcaaagcagcctgggaatgtgtaaaaaagaacacacaaataaacaaaaaagtgccgagtggtcctgaaagcccacgggatgagacagtttacagtgtgagaacatggtaaggcttttaaaaaaattgttttttctctttcatatttttcttgtaattgcttattttaacacaaaatgaaattcatgatagctaacacttacataggcttactctatgccaggcactgatctggtgtaaatactttacatgtgccagctcattccattctcccactaattttcagagctaggtaatatccttctcatcactttacagatgaagaaacagaagcactgagacatgaggtaatgtagttaggaggggaaaatagaatctgaacccaggctgtctgaatcccaagtctgtgttcttaattatctaatgatggtattttgcctcaaaaaacaaacaaacaaaaaacaacttaggaatcatttggaaggaaacaaaaaaaatagcacaacaaagtattatgcaggtcattgattatcataaaatgactgtctcccaaagcaaggagagatgattattgaacacttactttgagccagttactatcttaagccatttactttaccatccccattttaatcctcataactctaatacgtaggtgctgttactttcatccctgttcacacatgtggaaagcagcagggcattaatctttctaaggccacacagccaataagaggcaaaagcatggcacaatcccaggctcttgattgtcttagggatggtcattaacgtgccatttattattctggttggtagtttagcaaccagctttctaattgcatttactattctctttaaagcagcgttgaatataatagactgcaaccatacttctcctctaccacctaagttgcaacagaaaaactgttgctttgaaggatgtgcaagagcatagacatggcccgcataaagcagagtgtgaaggtccccaaaactcaaggacagtattgtcatggataaatacagccgattgagcatgctgatgaaatgttgcattatcatcttgaaccttaaactttaaggaaaataaataaaaatcagtaacttcaaagagcatttcattaaatagacaagtctttattattaagccctcagcatttctcagctcagcagcagttcctgagactgtgtctgataatctgaatggatagtgcaggcatgtgctttacatttggaatgtcttagaattgcttcttggaagctccagtgccaccagctgactggaataaattacacgcctagtctcacatattgtcagaagttttcacgtgtgcatcgggtacagcctaaaggtttggcacagagctgtaggtacacgtttatgctcaacactgagaaattgaccagaaatagtcaccaatgcttcacactttctgaaactcccacgtgtattcctctgaagtccctttctcattctaccctctccatgacccaaattgtcattttccattcagttttccttccccactcctttagatcctgtttggtagacttgccgtaggaacacagaacaaaatgaaacattttcttatgaatattcgtaaatttctgatggtcttgccctgttaagaccaaaatctataggtgtgccgggtgacatctgtaaaatggttgtaattatgccacgttctcttggtgccctaaaacctttgttgaattttttacagtagagctttttaaataagactttttatttggaaacaattattgaattgcatgcacttttaagaagtaatacagagagatcccatggacccctttacctagtttcccacaatggtgattgtctttgtccatttcctgttgcttagaatacctgaagctgggtaatgtatgaagaaaaagaatgtatttcttaacagctgtggaggctgaaaggtccaagatcaagggtctgcatttggttagagcccttttgttggtggggactctcttcagagtcctgaggtgtagtacagggcagtatatagtgagggggactgagcctggaacctcaggtctctcttcttacaaagccacaagtcccactcctatgataaccctttaatccatccactcattaatatattaatccatggatagattaatccactcatgaggtcagagtccttatgatccaattgcccctaagctcccatctctcaatactatcacattgggtattaattaaatttcaatatgactttcggagggggcacatattcaagccatagcggtgacatcttgcagaattgcactggaatatcaggaccaggatatggacattgataaaatctaccatgtcagtgggactcctgttcaactcagatgagggatgagcctgcctggactgccttctatggtaggttaggggttaggagttaccaggcctggcttactttctgctgttggtgagggaaggaaggtaacgttctttgttgcgatcttcctccagtcctggggtccctagccagttttcctgcttgttcacaataggtactaattgatgctcagctgaaagtcaaacactcagattttctcagtgttatttgtacttattgtctgtgtgtgtgtgtgtgtgtgtgtgtgtgtgtgtatttacggctatgtaattttaccacatgtgtaagttcacatatccctactacagtctccattcatggagaataggttactggttatgaggagtgagggagatgagacagggccgaaagtggtgaatgtatttataaaagggcaacagaagggatccttgcggtgatggaactgttctgtatctggactgtatccgtttctataattatgtcatttcaagaatattctctaaatggagtcatacaatatgtaaccatttgagattatttttccctctcagtgtaattcccttaaagtccatacaaatggctatacgtattaataactcattcatttgtattgctaagtaatgggtcatggtatggatgtaccacagtttgtttcgccattcacctattgaaggacacctgggatatttacagttttgggcttctgtgaacattcatgcacaggtttttacataaacataagttttcatttatctgagataaaaatctcagagtatagttgctgcgttgtgtggtagctatatgtttagtttcctaagaaattgtaaaattgctttccagagtgcctgtagcattttacattctcaccagcaacgtctgagtggagtagagaggcttcccagcctgggcacttgttgtggagagattcccccttgctgtggctgcccagctgccttgtgtgtgttggtgagaaaggagtctcatgtctagtggggaaggaacatccttctgtctcctgattctcagtgggctgccagttggttgatcccttgcctgtgctgccaggcttaccttctgttgtcagtgggactcctgttcagctcaggtaagggatgagcctgcctggactgccttctatgataggttaggggttaggagttacgaggcctggcttagtttcttctgttggtgagggaaggaaggtaacattctttgttgccatcttcctccagtcctggggtccctagccagttttcctgcttattcacaataggcaggtattgttgctcatgagcctctgaattggctgggtgttttttctggtcttggctttgtttgtcccttgcactaattgatgctcagctgaaagtcaaataggtggctctgctgatctggactgagctgcctcacatgtttggagatcaactggctatgggctcatctagcatggcctcagcttgcacagtcatgctcttctctctgtggtctctgattcttcagcaagcccacctgggcttgtgcacatgatggttgcagggatccaggatagtgtggaagtgcacaagccctcttggaattggagcttggagttggcaagccatcacctcacttgcgtcgagtgaaccaaagcaagtcacaggatcagcccagagtcaagaggagaggaaaggacgtgcttcctgaaggcaggaatttcacattcatattgcaaagagcagaggtacaggggagcataaagaatcgaggccgtttttataataaacttaactcaccctcattgttgtgcatatgtatgactgagttcatctcttggggttctgaatacctttaacctgtctgtactttggttacagggactgacatctgagtcatttctctttgattcataggatggatttaatttttgaagccatccatcatggaaagaatatgctttgtcttctcagaaattgttatttttttccagattatttcttgacatgtttctgcatttttcaaatgtccttttaaaagtatgtagctttgttttccaatttttttttactgtggtaaaatacagataatcaaaaatttactgtcttaaccatatttgaatgtatacttcactgccattgagtacgttcatattgttgtacaaccatcaccccccatccatctccagaactcttttcatcttgcagaactgaaatgctaatccattaaacaataactcctaattcccttcttccttgagcccttggctggcacccttctactttttgtcttatgagtttgtctactccgtgtacttcatataaatgggatcatacagtatttctcattttgtgactggcttctttcacctaatgtaatgtcctcaaaatttgtttgtactgaagcctgtgtcagactttccttcctttttatggctgactgataaagagggacctgcttccgtcatgttgctattctttttcctatatgtcttatcacttttttggttttccatttcctgcatttgtctgcttttgtgtttagttgattttgtgtagtgacatgtttgaatttttttcttttttttttatattctacgtctgtttttcttgtagttactatgcagatgacatttggtatcctaaagtcaaatactcttaatttggatttatatcagctgaacttcaatattatacaaagtgctgctcttttatatcttcattcccactgttttcagttgttgatgtcacaaaatcacatacacgatacttccaaaaacatcaataatttttaaaaatgcattagccttttaaataacatagaaatcaaaatgtggggttaaaaaccaaagttacaatgatactagcttttagactaataattgcttttaaaaaaagtattagcatcttaaatcatatagaaaaaagtggagttacaaactagtgctaaaataatactagcttttacaattgcttatgtatttacctttactgaaatctttatttcttcatacagctccaagttactatccagtatcttttcatttcattcagaagggctccttttagcattttttgcagagcagtctacaggtaacaaactccctcaacttttgtttatctgggaaatcttaattccaccctcacatctgaagtcccattttcctagctgtaggattcttggttacagggttttgtttttgttttttcaaattttctgataacaaatctgctgataattttattgaggatcccatgtatcgtgatgaatcactgcagtttcactgatttcaagattctgtctttgtatttggctgtgggaagtttaattacaacgtgtctcaatgtggatatcttaaagttcttcctacttagagattgttaaacttcttagatgtttgtattcacatctttcctcaaatttgggaagttttcagcccttatttcttcaagtatactttctgttctttctccctctcttctttttctaggactcccataacacatatgtttgtcctctttattgtgtccctcaagtcccttttgctctgttcacttttcttcaatcttttttctttctattcctgagaatattttcctttgccctatcttcacattcactgattctttcttccacctcattaaaattgcttttgaatccctctagtaaatttatcacttcagtttttttttctgctccagaatttctttttggtttcttttttggttttctgtctttatttatatttccattttgttcaaacgttgttttcttggctttctccacatctgcctttatttctttgagcatcttcaagacagttgttttaaagtctctgtccagtatattagccatcagggctttttcagggacagttactgttgttttattttttttctttaaatgagtgatactttcttatttctttgtatgccttgtgattttttgttgttgttggaaagtggacttttgaatctaatgaggtaatatggaaatcagatttcccccttacccaaagtttgctgtttttgttttttgttttgctggttgttgtaggctgtttctgtgccatggatcagcctaaggtgtatacttaagttcttctcaggtcttttctgagcctctgccttttgctgggcatgcacaggcacttcctaattttcctcatatatgcagttgcttttgaatatcctaatcttcaatgtctgcttcctaaaagaagagaaagagaaaaattaggggataaaagaatactggcctttggccaggcacggtggctcatgcctgtaatcccagcactttgggaggccaaggtgggtggatcacgaggtcaggagatcgagatcatcctggctaacatggtgaaaccctgtctctactaaaaatacaaaaaaattagccaggcatggtggcgggtgcctgtagtcctagttacttgggaggctgaggcaggagaatggcgtgaacccaggaggcggaggttgcagtgagccaagatagcgccactgcactccagcctgggcgacagagcgagactccatctcaaaaaaaaaaaaaaaaaaagaatactggccttttaaatctcatggaagtcactttaggtggttggtagaggcctacaacagtgggggaaggtgcagcaacagcggccactggcctctttgtctgcacctctgtgatcaaaagcagcaatcagtgataagaacagatgtcttgtgtttggaggacagtgtcctttttgcctaccaaggctcctgcaaaccgtatgccaagctgctccaggaacatgtgcacagctgcctgccatgggactggggcatgggataggtagctctattatgccaagagctgaaattaactgaaaataacttcaatttactgtccaagccttcttctggaagttggaagccttaagtagcctccagagttccaaaatagttatactggacagattctgccagtgcaattgttgtccaggtgagaatacagactcctggttctctctcctctgccatcttcccagaatcatcctctgtatcatttttataatctgaaaaaaatagttgtggaatttggaggtatttttctaggttttatgatcttctcctgaatgttactctttgtccagccttataaatttttggtattattatccagacaaccatgatcctacaagtctgacaaaccatgctgtgactacttctaattgggactgttaaattatcacactcatgcattcctgtgagggaagccttttgcttctatggtgggtcctctgtggaaggtgcgtctgccggggacctgtgaaggctgggcagtgccccagggaactgtgaaggctggacagtgctcggcgctgatcgatggcagggtcagctttttgagagccctgtttgtgttgtcccactcctgttcctggagaaaatcacctttacaaaggctcaactggcaattttggaattacttgggtcattgttctgaatgtgctattggttttcagtaaataaagttcaaattagaagcttagaaatagtttaaggtgtttggtttttgagctcctaatagtctttcttcactattttggccctcttggtttctattaagttggaccatatgtaattgtcattttgtaagtcaaaagcaatggaatagtggcaactgcctatggttcaacctaatactttacattttacctgtagcagattgtggctttgttttgttgccttctcaactttcaaagaaagcctttttttttattttatttttttttttctatttgaaggctgtttcccagaccagatgtatctccagctctgacacatatgtgcttgactggtcattcacactgatgtttctaaatcagcctttcataacatttttatttattagtacctctttttttttcttttttttttttgagacagagtcttgctctgtcgcccaggccggactgcggactgcagtggcgtaatctcggctcactccaagctctgcttcccgggttcacgccattctcctgcctcagcctcccgagtagctgggactacaggcgcccgccaccgcacccggctaattttttgtatttttagtagagacggggtttcaccttgttagccaggatggtctcgatctcctgacctcatgatccacccgcctcggcctcccaaagtgctgggattacaggcgtgagccaccgcgcccggcctagtacctctttaaatgaaaaaattatttgataaagtcttgactgtctttcccacagttgtttgtgaccagtatttgcactgattctcgaaacgagtgaatcttccaccagtccctaactgtgatcctaatcacgtgtaacgtatttcccaccctgcattgtccacaggattcttcattcatcacctaccacgcatcaaagtgccagacactggagtcagaaatatgatagcaactcatgtatgctgtgtgatcagtaactatctgttgaatgaatacatgactgagtgtaagttaatgaacgaatgagtagcatttgctttggaggagctgtctgtcttcagaagagagaaacttgtaagcagacattgtcaatttggtgtgcaaaggacaatcatagatgtgtatgcaaagggccatgggaacactgcagagatgttagtttttcatatgcactgtacccacattctgtttcccagttgcacggtgaaaatctattctgtcagatttgtgttttgatcacttaaggcttctgttactatcacctgaacaaattatgcagatttctcaatcacatttgacatttctggttcaatattatgaacccgatcagatcccattgttgtgtaacattttctggatatatgtcttcgtcacctatctcacaggtttgttgtgaggcgtaaatgaagatagtatgtgaatatgtataaaccactatgcagaaaacatggaggttaagctgtcactctggatgatagttgttcatcactgcctacagtaactgacctataaaacaaccactaggaaaaagaaaagaagatattttgctttttttttttttctggaagaaatacagtagatactcaaattgcctgccaatagaatagtttcctggacaaggatgaatctagaaaggacatttaacagagattgaccttggttttgttacagtgacctgagaatgtcagtcagtagtcttgcataaccaccatatagtgaaacttctcaaaatctccatggtaacatgcagagaactgtatcatagagcacggtgtatacccacacggactgtgatccaggaagaaagatctgtttccacccccacacacacttgctcacgttcacctctcttctgccccagcgcctcagatacctgcttcctcactggtaattgtgatgatatttttctctaaaatctattttgtaactcattctttctgattttactctcaacccccttggcgcttacattggatgagataaaagtgtcactgtagggctgtaaactttgttgtgatgaagactcttgagacgtaaaatgtatgctctaactgcagacctgtgcagaacgcgagtttgatcttcaagtgactttcgttccagccttgatattcagatgcagtgcactaatttgcccttattggcatcctgtttaatagatattcctaagcctttttccaaatagttgcatgtttgaggaagactttatggctatcaaagtgtttactcatataatccagtttgatcctcaccttgtgagatcgtcagggccggtaggatggttgtcattttacagatgaggagacattttctgatgggaattagccaacctgtggctgagctggaaccagaacccaggcctgtgtccttgtactcaggttgccacagcattcctcctgatgtgcccagcagcaggcttctaaaggacctgagccccctctgccaacagtgtcccctcttagctactggtgtgatatgtagctgtgagtccagggtgggtattcacatattttcgattgaccaccagcttaaaacttcccatgccacaccacactgcccatctatatattactttgcaatcattatcataagcttaaaacttcccatgccacaccacactgcacatgtatatattactttgcaatcattatcataagcttagagactttacagaaagtcgtccttaaagtgttgctaaaaaatataggtcaattacaaaaggagacatggtccttttcttttttcttctcccctaattataaacaataaaagccacagcttcatgctgagaaaggatcagcagggaatgatggacattgtgatttggcagctgacattttctaacatgattttgttttacataagtagtttgaagtttttgttggttattgtcttgccttcctttctgacaaagtaacattttttttgcccataaaaatcaagtagagcaatgcatttcccatgccgtcgtgtctcccatcttgtagcaaccagtagtgtataaaatgaaagtcttcccacctttaagcaaatgtttgttttccttattaagaaagaagtttcatttgaagctggaggtttttttttcctaacttatattagtccatattttaatagtagtttcctaaagaaaatatctcagcatgaaaaagcaaggtgatactatattttagaaaatgccctcatggcttagattttaaaactaatgcttttgttaagtgttttggctttgaacaaaaagcctccttgagaaacgctatttcccattgcacggtttcttaactctctgggttaaagttcgtattttctatctttttacatctggcaaatagacccagagaatgtttttgtttcatctaacagttatttctacagatctgaccaggctgcctgcacacatctatatttttacactgacagcataagtgtatgttttgtatttcattgtagcgaaagcacttcacgtatgcttatagtaggttgaagtatttttagatcaaacgtgaatccaccatgttccgtaaactaaaatatatttaatcttaacagagtatacttggcggaatggctgactttaaacataagcttaaacaaaatgatgagttcataattatttaatgtaaactgaataaggttgaagggccctgcagggtcgatttcaaagtgcttcaatgattacaaattatagaccgcctttccagtaaaacactactcaggtgggagactagctggcagcactataaagtacctaaatggtttcagactaaagaatctgttagttttgtaggtttaacatccttgacacttaataggatttgagattccattgtagcagcagcttttattgcatgacactttaattgaatgccttagagtaaaatgaaattaacaaaggcagtattaaattatggatgttccttttttatcatttggctaagaattctgcggagtttcttttctgattatattattttaaattgattgatgtgaaaaaataaacacactatctttaggactaggtataccatctggtccaagaaattgtgaataaaatgaatacagagctggagttggccaacttgtctctcctacgcttcagaaagcaattacgttagggctagagtagtttaaaaatggcctgcaataaatccccattcttgagtggataagagcaaggcagctccgtcttttgcattgtagctaccagaatgacaacgtattctgagacagatgggagacatcgaacagtagttgatttttgtttgtgaagtggtgtggcaaagccagtaacctattttttttaaaaaaaaaaaacaaggacaaatttaaccaaatctgacctgtttatatttaaacatcggtgattggaaaaccgttttcatatttggatattgacgatctttatattgcttctccttttctctaatactatttaaaataagaatctgcaactaaactaaaatattcaaaaaataataaagttaagatgatgagtccgggcgcggtggctcacgcctgtaatcccagcactttgggaggccgaggcgggtggatcatgaggtcaggagatcgagaccatcctggctaacaaggtgaaaccccgtctctactggaaatacaaaaaattagccgggcgcggtggcgggcgcctgtagtcccagctactcgggaggctgaggcaggagaatggcgtgaacccgggaagcggagcttgcagtgagccgagattgcaccactgcagtccgcagtccggcctgggcgacagagggagactccgtctcaaaaaaaaaaaaaaaaaaaaaaagatgatgagcatgatgtcagcaagatagtggaatcagaagcctcagtctctactcccctgacccccacacaccaaaaggtgaacttgcagctgtccacagactagaatatctttttgaaaatgtcaacacttggaaacgagcctgagatacctgtgtgatctgcataattcaatgaaatctgaattaggagagtgagaagaatggtctcactctgaccacactgccccttcccatctcccaagttggcacagtgccagactgagaggatttccctggaccaacagtttctgccacagggaaagagaaccagaggcagtcatctagtgatgctaacgttccaggatgcttcacaagaagcccactctggtctcacctcttaggaaacactaggagaaacagcatggccacagtgcctagggtcaggtagaaacaaagaaaggaggcagaggtcatggttaccagcacatggatcttagaggtacctctgtgtttctggcagctgtggctcccaatagcagataccagtcaacttcataacccacatttaaagctaagctggttgccttcattaacgtggtaggaatttctacctagcctgagttcctagaatgctattctccctggctagcttcagagcccacccaacaagcctgcacaggcaggaagacattcacctcctcccatttcagggaagcaaaggggctagatcagcttgacccagaaagtcgagctgtggctccacctagctagaaagcccacccaaccaccctgtgcaggcagagactcccacctcctggcattttggataaatgcaggggctagtcttgcttgatctagaaagtcaagcagcagcactactcagccaaaaagcctgcccaatgaccccaccctagccaggagactcccagctccacagatttcagagaaatgaaggggttagatcagctttacctaggaaggcaagcagtagttccactcagcccaaaagcccacccagtgacccgacgtaagcagggagactcccaccttcatggatttcagaaaagcatagaggctagacctgcctgaccaggaggtcaaacagtcactcaactcagtcaaaagcccacctcatagctccaccctgacagggaggaaatcctgaatcatgaatttcctaaggaacatagcctctggtctgcttgtcccaagcaatgactttgctaacctcagagaacagcctatagccctgcccaactgtagatctcaatagtggccaaggaatacatcctgtaactggcctgaccagaagtcattgcagtacttagccagcaatctcatcaaacagggaagccaggcccacaaccccacctgacatcagagcaaaagcagcagcccaactaagttgtgaactctcatgaagctctgcctgcccaggattatcaccagatggcccttccagaatcacagtctagattagatagtggaaatctattcctgtcaaagaacacctgtaaaggccagaaaaggggactgtcttctcaaatgtgcagataacacaaggattacaatgactcaagggaatcatgacacctgcaaagaaaactaataaagcttcaatagtagaccccaaagaaatggagatctgtaaaactgttgacaaagaattcagaatagtactcataaagaagttcagtgaactacaagaatctatggatagaaaattgaataaaatttggaaaacagtacacaaagaaagcaagaaatttgaccaaaaatagaaacaataaaaaaaaacaaatcttagagatgaaaaatacagtggctgagttgaaaaattcaatagaaagcttcagcagaagacactgtcgagcagaagaaagaattagtgatctggaagacagaacatttgaaataatccagaagagcaaaaagataaaagaatgataaagaatgaagaaagcctatgagagttatgaacactgtcaagagatgacacctttgtataatgtgaattaaggacagcagagagaaaaaagcaccagaaactatatttaaagaaataatagctgaaaacttttctaatataggaacagatgccaatacccatgttttaggctgttgttgcattgctgtaaaggaatacccaagactgggtaatttatgaggaaaagatgtttcatgggctcatggttctgcagacagtacaggaagcatggtgccagcatgtgcttctggtgagggcctcaggaagcttacaatcctggcagaaggcaaaggggaagcacttgtctcacatcgctagagcaggaacaagaggtgatgggaaaaggtctccaactccttctaacaaccagatcttgtgtgaactcattaccatggggagagcagcaagccactcatgagggatctgtccccatgacccacacacctcccatcaggcctcacctccaagaacgtggatcacagtttaccgtgagattgagaggataaatgtgaaatcatatcaacccaagtacaggaagcagagttctccaatcaaattcaacccatagaagagtttaccaaggcacatagtaatacaattatcaaaaatcaaagacaaaaattccgagagcagcaagagataagaaacacttcgtatacaaaggagtaccaatactaccatcagtggatttctcagcagaagccatgcagacactgaaagaacaagatggtatattcaaagtgctgaatttatatttatattttacaataaagtgttgaatatgtaacgcaagggtatcatactgcatattagtagttgagaaaaatattaaaattcaaaatttgaatttaatatgtattgcttttgcattattgtaaagttgaaaaattctaagttgaacttttataagtcaggaattgtctgtacttccaaaaatctttttacaaagccaacattaccttggtaccaaagccaaacaagaacattataagaaagagagttaaaggtcagtgttcttgatgaacatagatgcagatttctcaacaaaatactaacaaactgaattcaacaacacattaaagggatcattcatcatgatcaagtgggatttattcttcgatacaaggatggttcaccatacacaaatcaataaatgtgatatatcacattaatggaatgaaggacaaaagccatgtgctcattttgttagatgccgaaaaagcatttgacaaaaattcatctttttataaaaattctcggcaaattagttgtagaaggagtggacttcaacacaacaaaggccgtgtgagagaatcccacaattaaaattatactcagtggtgaaaaattgaaagcctttcctctgacatagacaaacatgcctattcttgccacttatatttaacatagcattggaagtcctcaccagagtagttaggcaagaaaaataaatagaaggcatcgtaataggaaaggaagagctgaagttgtcactgtttgctgataacatgatcttatatatatagaaaatgctacagaccccaccaaaaaaaaaaaaccctgttggaactaataaacgaatatattacagttgcaggatacaaaatcaacacacaaaaatcagtggcatttctatatgcaaacaatgaactatctaaaaggttatcaagggaacaatttcatttacaacagctacgaaaattacttaggaataagttcaaacaaaggagtgaagacctttacactgaaaactagaaaatgttgataaaaaagttgaagatacaaataaatggaaaaatattttatgttgatggattggaagaattaatattgttaaatggccatactaccaaaaccaaccctaccaattcagtgcagttcttatcaaaactacatcatttttcataggaatagaagaaacaattctaaaatttatgtagaaacaaaaatacccccaaatagccaaggcaatcatgagcaaaagaataaagctgaaggcatcacactacctggtttcaaactatactacagagctatagtaattaaaacagcatgggactggctgaaacagatcaacagatgaaacagactagagaccccagaaatgaacccatgcatatgatttaaatttattttctttttcttttttcttttctttgttttttttttttggttagagaaagggtctccctatattgcccaggctagtctcaaactcctggcctgaaatgactcatccctgagcctgtcaaagtgttggtattacaggcatgacccccatgcctggcctattcaactgattttcaacaaagatattatgccaagaatatgcaataagaaaaggatatccccttcaataaatgactttgggaaaagtagatatccatacacaaaagaatgaagttagattcttacttcacaccatatattaatataaaaatcaactcaaaatggattaaagtcttaaatataagatgagaaactataaaactaatctacagagtaagaaaaaatatttagaaaccatactttggataaggggttaatatccaaaatatataagaagctcaaacaactcaatagaaagaatacaaaaaattctaattaaaaaaatggacaagggactggaatagacatttctcaaaagaagacatacaaatggctgacagatacatgaagaaatggtcacatcagaaatcactaaggaaatgcaaattgaaatcacaatgagaaactacatctcacacctgtcagaatagctgttttcaaaaagacaatataacatgtgttggccaggatgtgaaggaaagggaaccctgttggtggaaatgtaaattagtgcagccattgtggaaaactatgtggagattcctcaaaaaaaatgagaaatagaactgccatatgatctggcaatcccacctctgggcatttaccgaaaagatttgaaatcagtgtgttgaagacgtgtgcacaccaatgtttactgcagcattattcacagtagctgagctgtggaatcagcctaagagtccatcagcagataactgggtaaagaaaacgtggtacttacacgtaatggaatactattcatccttaaaaatgaaggaaatgctttcatttgcagcagcatggatggaatcagagagcgttatcctcagtgaaagaagccaggcacagaaagacaaatatcacacaatctcactcatctgtgaatctgaaacaataactcatagcagcagagagtaaaataatggttatcgaggctggagggtggggggaatagggaggtgatggtccaagagttaaaagatctcaggcaagaggaattttttttttagttttgttgctgagcatggtgaatatagttaataatagagaattgtacacttcaaagtgtctgagagtaaattttaaaagttctcaccataagaatcattaaatatgtgagctgatggatatgttaacgagattgatttaattattccacattttattaatcaatcataacattactttgtaccccatacatttatgcaattgtgaattgtcaatttacaattaaaaagtattttcaaagattttaaaaagtggaggctggactgcttaggacatgtgaaaacagaagacaaaatataagaaaacattacaaattaaataattattttcttaacagactattggtgtaaatgctttataagtaactgtctactggatggaaagggggaagaaatttgaacatatctggtaaattacttagtaaatttaggcatttatttaaaaaaaaatacacttgctcatgattataagacttctgagctcagattgtgagtgtgaggaaagaggagacagcctcttaaaaaggtcccaagcatgacagatgcagatcttggttgagagttgttgcttctgctgtcagtcacatcatcatcctgttaaatgtgaatttatcttttttcccctatgcaaaatagtgagagaaatattccttgaggaaatgtggtctttatttcaaattaacagttttagcgattgcttgcttttattaggtcatgcatcttgttttctggatttgtcatataatgcagttgtgctcgtgtaggtaacacaaatgtggtctctttgaacatagaagctgggattgcagtgaaatagagagagcgaaagtgctctccttaagtcctccttgtttgttctctttcttttgggttctgtctgttaatttatctcttttactctttcccttcttccttccatccttgtcaaaagcatttatgtactggacagaagcatgtcttggatgacttaaagtgcagccctgttttgtagttattatcttcctgcataataagtaatctctgttttccacttgttgcagagttaaacacagctttctagtgaatcctcaccctagagtagaggaatacgtgatattaattgaaatagacttcctacagggcattttgtagcttttctcctctttctcacttaaaaaacataccagatagttttgtgttcaggaccttaaatcctagcctagcaacggtcatacattgtgaaacaaataatgagagagaaggttatagttaatactcttataagcctctccatgtacaagaatacagacaaaaatgcaaagaacagcactggatgtcttctgattaatcaaattatttctgtgtctcagtgaatggactgaaatacagtacagcctatttgccttaataccgatgaatttttatacagtgagtacgttctctggtctttttctcgctgatgaaatggatgtttgtgttagggctagagggagaaaagaggcgtgatttaactgttacctgtgcctgtgctttacagttttcctttttaaaacaagttttgaggaatacacctcggtagtactactgtacagctggcaccctacaactccctttggctcctgcagctcccccacacccccaccaacacactaatccatataaaagtcatattactggagctccacctcatctttttcagatatcaaagcaaatagaagaaatagagtataaacattgttctcttactctgacaagcagaattgatagacatctttccccatacactttagtggtggttgacataaacattgtttttgttttcaggttggaaataggaaatgagacttgacaatatattcgtgtcactaaaattctttattccagaaaagacttagtattgaaatcacacacacacacacacacacacacacacacacacacacactcccatacagaaaacttttctcagtggactattgccgttagtctttctcctttttcccacctaattacctgacattgtttgaaagataattataattgacaaaattattttttctatacataagcatctaaactctgattaactcaggaaaacacaaagaaaatagttacttcatttgcagaaaagcaaaggtgacagagcgtagcaacatgatgcagctgatcacactggagccttgtgcacacgctgtgttcctcccatttgagcttaccctagagatgaacctgtgtaaaaagaggtaaataccaacaggaactgagagcaattctagaaaaactaatggcattggttaaaaaaaaaatcccttctcctcaatttctgtgtctaagtgattcctaaagtaccattttataaatacgaagtatcattcctctggaagaccattcctttttgtttttttcagctggcccgagccctacctgtcctttccttataaaatactggccaggtcatcagaaaacagttaactcagagatgctctctaaaaaactctctgaagttgacctgcatggcagaagtgtagcaagtcaactctctctgctgtccctcacctgttctgtagctttgtgaagtcctgcatgaaagcatttcaacataagacgtggtttcattggggcccttctacctcaggaccgctggagtttgtatggctgtcagtgtcacatgcggttgcacagaagccactctcagaagtctgaagagaaaggaactgaataggagagttagtttcttagagagcccgtgggaggaccggagggcaggctcttggaagtgactctgagaatcatgccaaacagctcgtgtgctccggggagtggacagtctcaaagctgcagccccacctcccggcccgggacctcactccttctgcttcgattgaagcaggaagccactctgcactcactggctctgggagagagtgctcgggcaccagcttcttcagcagtgtccccgcctctcaacagtcatgggtggctactgctgccggacaccagacaccttcatacgcacgcttgtcagaacagcagaaacctggtctcaccttgtgtctccctccatcgcccataacagggtgtgcggtcagtgtgtgaaactccacaaggagtttgagaaatgcagtctcgtgctttctagcttctgccaggccggagagtctgtgcagaggggataaggtggggtagaacaagtctgtctgtgatatctaccacccagtctgcatttgaagtggaattatctcccgaaggcaaagaaatcacatgtcctattagaattctgcatgctgtgtgattctgatgccatgattcctataccttttggtcaggggtgtccaatcttttggcttccctgggccacgttggaaaaagaattgtcttgggccccacataaaatatactaacactaccgatggctgatgtgctaggaaaaaaatctcataatgttttaagtaagtttatgaatttgtgttgggctgtgttcaaagcagtccgcgggttgggcaagcttgctttaagtcatttgtgtggtgtgtcaagtagtgctacccaaaggtccctcaaaaagcatcattcgcccttgcctctcccagttccgagagaggagacagaattcagggctgagcctgtaggctgcgtgagtctcctgctcagtcctgagaagaagacctgggcatgggatgggatttagatgtagaatagaactgtttacgggggctcccctctgttccctgagcatgggttgtcattggttggcacaagtgccacggctgacaagctcctttctgagggagcagagcttgaccatatacaagatatgataatactgtttgtcaaggatacagcctgaaagaatgaaatagattgaccctagggaaggccactaaccggggaaagtaattccacttgtagctgcttttttttttggacggagtttcactcctgttacccaggctggagtgcagtggcatgatctcagctcaccgcaacctccacctcccaggttcaagcgattctcctgcctcagcctcccaagtagctgggattccaggcatgcgccaccacgcccggctaatttttgtgtttttagtagagatagggcttctccatgttggtcaggctggtctccaacccccgacctcaggtgatccactcgcctcagcctcccaaagtgctgggattacaggcgtgagccactctgcccagcctgtaactgcttttctactttacaggtataaataagtgttcctaagcaacccttcttaaaattagttattttaatgggactttttgtgttaggttattttagaaacattggtcacgtgtatatactttgggaattaaaaaagaaaagtggtgacaggttggaaaagtgtatcatccaacttctgatcaaacatggagcattaactctacacttatatcatctcttcctcctgaaaccccatgaagatgatagaaagacaagaagatcaagtgtgaggtacgagggaaaagggattggagaggaggcagcaggaggctgtagatgagatggcttgtgagacctttgcaggatagaaagcacttggagacacaggagctgaccagcggaacggggactgttgcagtcagagagcctgcagatcagtttacccgcgcaccctggacaggctcgaggacaggctgtgttggggggttgggggcgggtagggggcaagtggcaggagtggtgggaagtttacacacagcatggtcgccagctaactctgcaccatttcctgccaccacctctcccccttcccgaggaccaaatagttattcagcggagaagttgagaaagaccccgtagtccaaatgccaggtgtagcagagtgggaggtgaggacctgagaggagaagtctgcagactgaatggtggggccactatcctattttctgccgtccttcctcagacaccagcaactgatgtttatgtcacagtttagaagccagggggctgtctctgaagaaatggaatgggttcagagagaggactttcagatatttatatctgaaaacagaaattatactaggtatttcaacagagggatttaacacatggtaaagcccctctcccttttcccgccctccagtctcctgtggctgctcaatggcaggttctaacgaggagccagctggcaaaggggcctgcaaaaccagtctgcagagaatagtgtggaaaggtgggtttggagctgagaaatcagaagcgaatggcccacacagaggcaaataccagatcacatggttaaaaagtctaacagtcggccaggcgtggtggtcacacctgtaatcccagcactttgggaggctgaggtgggtggatcacttgaggtcgggagttcgagataaccctgaccaacatggtgaaaccccatctcactaaaaatacaaaattatctgggcatggtgacgcatgcctgtgatcccagctactcgggagactgaggcaggagaattgcttgaacccgggaggcagaggttacagtgagctgagatcatgctattgcctgggaaacaagagcgaaactgtcgccaaaaacacacacacaaaaccaagtctggtagtggttgcttttgggctgtggaacttggggctagggaggttgggacaggggaatattcattttgggggcagaagctaaagtgtgtagaaattaacttgacagtaatcaaagaggtagccaccctgcttggtttgaatcacagctccgtcactcacttgctgtgtgaccttgggcaagttacttaacctctctgtgcttcagtatcctcatcggtaaattgggtctaacagcagtgcctagttcctggggagtgacaaaaattatttaatactcttaaagctcttagaacagtgactggtatgtagtaaatattacataagtggtagtttaaaaacaacaaaaaaaaaaacacctgtaccattaagggctgagatggcagacaaaacctgagcttaggtgaagaggagtgtaacctagcaacattgtgctggactagatgaatccgcctcgtggaactacagccagtgagtaggagttgtggaaacagatttaatctttgggaactgttttgaattatttaggtatcggggctccgtattttacaagaagctgaggcagaagccatgtcatatggaccagctcatcatggtgtgagcataaggaaagactgacttcgtggcagatggtcattctaaggttccctcagggtcatcagtcatgagcccaaaatagcacgatgctgcagaggctgccatcctgagggatgcggctgccgatgtggttgctgcctggccttcatcccctcagtacccaggcagagaccgagtgggatggtaccacttgctcccttgggtggggaggacgattggagaaggatgagtgggctcacaacaggtgcccactcagcggaatccaatttcctgtctctgaaaggagaatcagtttgtgaaattgaccttaatcaagggtgatctgttcggagagtgctctatggatgccattcttttctgggtcttttggccagttatggaacaaagctcctcagtacctggcattgctttgacactggcatggagtcaggcatggtggctcatgcatgtaatctcagcgcttagggagggtgaagcgggagggtcacctgagcccaggagtttgaaaccagcctgggcaacacagggagagtttgtctttccaaaaaatgcaaaaaaaaattagccagatgtagtggttcatgcctgtagtcccagctactcaagaggctgaggcatgaggattgcttgaacccgggagttcaaggctgcagtgagttatgagtgcaccactgcactcccgcctgggcaacaggacgagacccccttcctaaataacaaaacaaaataacaaaaaaaacccttgcattaaccttaaactgggcctctcataactgcctggctccagaccattccagccccccacttccatgccctaaaatgtccagatcctgacctgcaattgcctgaggccatgggtcctgaaccccttcaccccttcaccacagactcaactgcatgtgcctttcctcctccctctttgctttcctcttctctttcttccatcatttctagtgaacattagataattaattttgttgttttcctaagatctacgttcttgagggcatgcaccgtgacttatataactttatattcactgttcccctgcccaggcagacccagcagaaaactaacctgtgtcattcatgttagttgatgaataagcgaataatgcaaatcaggcttttatgctctcactctctaacccactgccatcaggtgcctgaatattgccttctctccctttctccctcccatccatccatccatccatccatccatccacctgtccatccatccatctaactactaccccctcctcctgcagtctcccatccatccatccatccatccatccatccgtctgtccatccatccgtccaactactaccccctccccctccagtctcccatccacccatccatccaacccatttgcttctctgtacctctcactcttgagcttgttgacttaacatcaggaccattgatggttcctgcctacagtccccatcaccttcctctagcactggcgttttaacatagaaagcttaatgagtgcattcagttctgctttggaacaatgaaatgttaactttgtaataactcaagcctttcacataagggggaggaaaagattcatttcacaatgatactgagaattgtgtaggagctaatggaaaaaaggtcaaaggattttagatcctagaaatgggacaatgacaaaaattagtactattaagaagagtgatgtgctgttatgaaaaatatctacccaaatgtccctttaaaaagttatatttccatgtaagggttataattttaatattttggtctgtttccgtaaaagacattacatttctaaatttgaaggcaaatttccaatattaaaagatcctgtcaatgattcatttactcagctttaaatcttgtcttccattcctctttgaaaagacctgattattattaataatcagctctgcctaagttgtattctccttggatagaaaagctatgtatttgaagatcttatgctctacaagaaaatcctgcccagcgattgacgtgacaaacgctgaatatttcagtgcacaatgacggtggctttcagctcatgaaaggcttcctcgtgccttagatagtcttcaggtttctttcttagtgcaaacttttaagtggacccgtgatcctctgccctttacagcttttgtatccttcttgtgtcgattctatagctgttgtcagcaactaagcaatcttgttttttctttagatttgggaagctacaaactgtatctttctaaaccttccactcctctgccacttactgagctgttggaagcaaagtttaaagtataaatgcagtgtccacattcacagtactggattctttaatggcagtgagtgtggttattctggcatcacagaaagggagtggacttatgcaggggtgggggtggagagccatatttctgcacaatggcagtcaccttggaagatgtaggtggatctacctaagcctgatgaggacctcattggtgtccgggagcagggtgctccctgccctgttctggggaatgtgaaaatcctctactgctgaaggccttttgttctaagggcacctccaacccccacatcctagtagtcggctgccctcagacttaccacatgccaaatatgtttcatctttaagaagcatgctatctttatacaattgaatgcactctttgaatctattttacgttttatgattttaccttttttaaaaaaagtatcatgaggtatttcagatatgcaaagcaagtataaaggagaacggcgtgaatgtggacatacccagctgaccccttgaaggtgtaaaagatcagcagcatggccgaatgtcccttcccacatctcctgtccctcaagacacagacactgacctgaacttgctatttaacattccccttttagcttctttttaaatttttataacgattttaaaaataggaagaaaaaaaaggcatatatggcaagggcatagctttgggacatgctgtggtttgaatgtttattccctctgaatctgatgtggaaacctaatccccaatgtggcagtattgatatgtggggctcttaagaagtgactgggtcatgaaggctcatggattaatggaataatgggttcatggattaatggttatcatgggagtgagaccaatggctttgtaagaagaggaagagggacctaagttcgcaccctcaacccccttgccatgtcaggccctctactgcctggattctgcagagtcctcacagcaagaaggccctccccagatatagtccctcgaccttggacttctcagaccccgtaattgtaagatatacattcactttctgtatagatcacccaatttcagaaacagaaaatggatcaacacaggatgcatccatgctctacgtggacatcatcctctttcctccatttcattggccctgaagacatctgttctagatcctctgtctgttgcccttcatgaatttttggacactaaacttggcctttaagaaaatattaatgagctttttatttaaaaaaaaaaagatcactattcatgttgttgttactattacagtattaaggacgaactctgtgccaggcactctgctagaaactttgcagatgtagctccctttatttcttgcagcagtcctgcaaggcatcgttcttcctgttctcagatagggtgacagagcctcagtgagggcaagtagcttgtccatggttagtggcacaactgactctaaaatcttttaaccacatcaagttgccctagcatactagacgaaatgtgttaggactcagacatgtctgttttacatgatacttagatgggaccatgtgctgtggctgtgatttttttttcccccttagaggcatgttggatagggtgtcttgtaaattaatgccacttggcatggcaggccccacgagacttggctttcagtacaccctggcacctcctgcagtattgctggaaggagtctgattcaggccttatagatcatttatattacagagaaaggcatgtgagagtctggaagcaaatataaagtgcgctgaactccttcagaaatgggctctgaaaggaatcttagtgactttaaagagcaaagctaggaggattggctgcgctcatggaaattttccttttacccctcactgtatctggctgttaaatgcctgtcttccagctggcattctctttcttatttatcgtgaagagttagattatgttaaattgaaaagtgacactgatgtattagaacccatcacgttagattgaggacagatacctgacttaaaatgtgccctttctgaagcatcaactctgaaagtatttggtgttcttcccatattatacagttatacgataaagtcacaagaatgggtttatacccatttgtattctacttcgagtcaagtagtaaaaatctgtgaaattgactgattttgctcagaataatatcagagagggcaataaatctaaactttggctctcataaaatgtgtttctgggaaggtaatgattcatgatcagatgcacacacagacatcatgagagtgctaagaaatagattcataatctttggctttaaaaatcgtagactgttttttgagctcaaccagcctgctctggagttcgacaattctgtgtagtctttctctttctttggctctcttgatttgcttacaggcataagttcagcctcctgtgatgtgttgaagaggaagaaataatgattaaagtgatagaaaacagttctgcaaaatgaaagggagaattgaatttgtgtaggttaataaaggcaagactaatgtaatgcggtctttaagtataagtgaaagctatgctaaagcatttatcctccgtgtccacggatggtcagaggaaatggaaggggcttaaatagaaatggagaggtttctttggctgtgaaaaagaatttcttaatcaggaaggtaaagggcatagcagtggatctcagaatgatactctgaagctgtttcgctgttgcttccctttgctggacgcagagctcctcaagggcagggcgacccctgcacattccctgcccagagcagtgctggtcccattcatcagtaatgcccctctcccccccagcctacaatccattccaggaccccacctgctggctccactttcagtacatagccaggcgcaaccacttcttaccatctccctcgtgaccaccttggctcaagccaacatctctgggcactgggttcctttggctgcccccaggtttgataacaaaaatggctttcattgtttttgatttgtttcttttgattattaaggctgagtatttttcaaatatgcagtattgattattaattttaaatgaatgtgttgtttgctgtacacatttttgcccattggcttttcagttttcttgttttttaaagagactaaagttatcaatgttatatagtcaagtatattacataaattttacatttagaaagtaagttcaaatgtagcaattagatatatacttaactaagttttattttagatacacataaatgtgatcatatattttctttttttttccttttctttttctttctttctttctttcttttttttctttagagacagggtcttgctctgtgtcctgggctctggagtgcagtggtgcagtcatagctcactgcagccttgacctcctggcctcaagtgatcctactgcctcagtctcacaagtacctgggactacagatgtgtgccattgtacctggctaatttttaaattttcgtagagatggggtctctaacccctagctccaagcattcctcctgcctcggcctcccaaagtgctgggattataggtgtgagctgccacacccgtcccatatataccttttaaaaaggttcatcttttcctgttttcccttttcgcttctttcaccttttctttttttctctttccctccacatatataaataagctaatgtatattttcttatttttctgtatagtcatttagccctatacagccatgtacatgtacaagaggggtgtgtatacacacacacacacacacacacacacacacacacacagtttttattgccgatgttttaaaaaattagatcatattttatatgctttactctatgttttcatacttaatacctaaaaaaaatcatggaaccccatttacatagatctaatttattcttttaaatatgtataatctcccatgctatgtatgtcataattgatgaagtttttccacaatttcttttcctttggaaaagccccctggaattttattttgctgtatggcatgagttaaggatctaaatttttttaaatggctagtgaatggttccttgatgttttcagaactgtttctctcctgttgatttctagctcttcctttattatatattaatgatttatatccactatggtctgtctttcagctcacttttctgtacagatgtcaactttttgttgttgcttttgagatcattcaaatcacttttttatgttgaaataacttgagacttataaaagagttgcaagagagttctggttttcccttcacacagatttctgtaatgttaacatcttacatgaccctagtccattcatcaaaactaagaaattttcattggtacagtaccatttactagagcctttttcccagttttttttcctgattatcttttcctgttctgggatcctttctgcactcccatgttgcatttagtcaccatgtctctgtagacttctccaatctgtgaccttgtcttccatgaccttggcactcttttttttttttttttttttttttgagacagattctgtctcttttgcccaggctggagtgcagtggcgcgatctcagctcactgcaagctctacctcctgggttcacaccattctcctgcctcagcctcccgagtagctgggactacaggcgcccgccaccacgcccagctaattttttgtgtttttagtagagacagggtttcaccgtgttagccatgatggtcttgatctcctgaccttgtgatccacccaccttggcctcccaaagtgctgggattacaggtgtgaaccactgcacccagccaaacttgacactcttgatgagtgctgacccgttgctttttaaaacgtccctcgatttggacttgtctgatggtttctcacgatcaagctgactcatcatctcagggcacttggcgtcaacatgacttgtcactggcagcgacagggtggtcactcggctaaggcggtgtcagccagtattgttccctttccacattctgttcttagaagcaagtctcttagcccggcccacatgcaaggggagagtagttaagccccctcctactagaaggagaagtgtcagtgactttgtggacacacattaaaactaccacaaaaaattaattaaattttgcgtagatacttggaggttatgcacatactctgcttttctttgaagttgtgcccactaattttagcgttcaccagtggatcttgcctgcagtaactgtttctgtggatttctaatggtcatttttctcttcccctcattcttctacatttattaatttgaattctcctgcaaggaaggtttgtctcttcgccttcaattatttattattcaatcattatttgtaattgtatggatttaatgtcattggataaccagtagaataagtccctcatgtttcttctcctctttaaaaaatcttgggcctttttattacttttttgtttcttcttataaacttcaaaatacttatttttcgttttcaggacattcagttggtatgtactttgaaattgtgttaaatcttccaactgaatctggaaagaaatagtatctttaggatccagtaattcttctatctcaaattgtggcatgttctttccattttcccagttactcatttaggccccttctaagttattcacttaggcttctcggtgttgaaggcatacgaatatgttagaccctgtttatcctggccaggtgcagtggctcacgtctgtaatcccagcactttgggaggccgaggcaggtggatcacgaggtcaggagatcgagaccatcctggctaacatggtgaaaccccgtctctactaaaaaatacaaaaaattagccaggcgtggtggcgggcacctgtagtcccagctactcgggaggctgaggcaggagaatggcgtgaacctgggaggcggggtttgcagtgagccaaaatcgcgccactgcactccagcctgggcgacagagtgagactccatctcaaaaaaaaaaaaaaaaaaatgacctcgtttatcctaaaattgccatactgggctcgtgacttctctctacccttgcctgagtttacttgctcctccaaatgctaaatttggaactaggtgcttttgatttgtatgtctaaatttgactaaattactgtaaagtgaatacttagttcatggggttttttaaaatttattctatgcttttctttctttgtctcctgggtgaagttttgggtccttgtctccatgagatggaaaaatattcctttcccagaactttgttactgtttagattactatgcaggttctgtgataaccttcaagtataggtgattttataaaacagatgtttttggtgagattgtagcagggttgtgggtttggctctcagtctccaacgtttctgttgggcaggatttgcatttcatatcctggcatactgtattaggaagcttccagcctgtgtgtctaatattatgggggaacacaaaacttccatttcctaatttttaatcccttgttctctcaattcttagccagctggcactggagtaatggcatgtaaggatcttagttcccattattcattggtgagcatttctaccctgactgatgtgtgctcagctacactaatcgccatcttttacttacttacttacttacttatttatttatttatttatttatttattgagacagagtctcactctgtcacccaggctggagtgcaatggcacaatcttggctcactgcaacttctgcctcctgggtttaagagattctcctgcctcagccttccaagtagcttggattacaggtgcccaccaccacacccggctaattttttgtatttttactagagacgggttaaccaggatggtcttgatctcctgacctcatgatccgcccgcctcagcttcccaaagtgctgggattacaggtgtgagctgcctcgctcggctgccgtcttttatttttttaaagtcaagtactgttttctctgccatcacataccaaatgattcagagtttttcgtctggatcactcctaaatatacacacacccaatccctgaatcagaagaccaaagtccttcataccttttgagatagcttattgacctgtagaaactgtggtgcattggaagcccgggtataccagcagcctggcccagtttttgtcttggcctagtggacttgtccttgttacagttcttggttctagttgaacaccctttaactttcttttttacacgtttttacaccctttgtccttcccaccctaacagaaatgtcctgaactcagacatttgcacaacaaattgaaatttttggcaaattcctttcattttcctagtatattccaaagcacagttaaactagccagactaacctgatggtttttgagcaagggaagacatagatgcggatgattaaataagacacatcactatttcatttatgagacattattgtgtaattagctatttcatataactgggtttttaaaatagctgaatgtaatatttcatcaatataacctttcccccattctttgtggttgggttaatgaaaacttttctaatatgtcttcacttctctttggagcatagtgcatataatttattctctttccaatgtcattgcaaggttataattaaaagcatgaattccctgtttcatgaccctagagtctactgaatgtttaatccttttttaaaaaattcactaactgacctcagctgtgcattctgagttcttacggctacatttatataatttacttatgaccattgtagattgtcattgtgctctctctctatcgtcctctctccttagccctaagggttgagcaaccagatcatcaggtttgacgaaaacaggaaggagggcctgggagggatggattgatgatgagtccttctcattgataaggaccctgagcaaggcctggtgagttctagatgctgtggctgctcccagcttgcatctctgtctctctggttccttctcctcttgcttccttggcctcctttggcccttggaacacgcccagcctgtcccattgcagggcctttgcacttggagctctcttctgggttttctcacctccgtcttcatgtggttctccctgttttgtgattcgattctcaaactccaacatttgtgtctccctgaaaactccagtgagaactctctgctgaccagctggaggatgaaacagcttgttagttttagtttagactttctgctttcatggattgagtaggggtattcctttttcttttcttcagcagagctgttctcttttactttttaactttttactgtgaaactgtacttaattatacattcacagaaggttgcaaaaactattcagagaagttccatgtacccttcacccaatgtttatattttataccactgtagtgcaatatcaaaaccaggagattgacactagtacaatgtgtgtttgtagttctttgtcattttactacatgtgcagatgtgtgtaactaccactacatccacaatacagtgctgggctggtctcacgcctgtaatcccagcactttgggaggccgaggcaggaggatcacttgagcctggaagttcaagaccggcctgggcaacataccaagaccttatttctaaaaaaataaaaataaataaataaaaattagccaggcatggtggcacgcacctgtagtcccagctactcagcaggctgaggtgggaggatcacttgaaccagggaggtcaaggctgcagtgagccatgatcatgccgttgcactccaacctggggagcagaatgagaccctatatcaaaaaaaaaaaaagtgctacagagctgttctgtcaccacagacatccatcccccttgtgctgccctgtaattgtcataccttccctggcagcttcccaacctggcagccgctaatctgttttccatctgtacagttttctcatcttgagaatgttatgtaagtggaccctacattaggtgaccttttgggattggcttttccccccacttaacctaatactcttgagacccatccaagttgcatgtatcaatggcttgtttctttttattgtgatgccggattctgtgcaacagaggtagcagtttaactcttcaccaattgaggaacatttgttgttgtttttgtttttgtttcatcccaaggttttggttgttacaaataaagctgctatgaacatttctattcaggtttttgcgtagatgtaaattttcatttctctgagatgaacgttcaggattataatcggtgggtcgaatgtaagtatatgtttggctttttagaaactaccaaagtattttccactgtggctatactatttttcattctctcagcaacatatgagagctccagtttctctgcattactgtttttttacattagccattttaataggtgtggaagggtaggtcatcatggttttaatttgcatttccctaatggctagtgatgctcaacactttttatgtgcttatttgccgtttacatattctctttggtcaaatgcttcttgttgtactctgcccattttcttttcttttcttttctttctttctttctttcttttttttttttggaaacaaagtcttactctatcacctaggctggagtgcagtggtgtgatcttggctcactgcaacctccacctctgaaattcaagcaattctcccacctcagcctcctgagtagctggaactacaagggcatgccactgtgcctgattaatttttgtatttttagtagagaaggggtttcaccatgtggaccaggctggtctcaaactcctgacctcaagtgactcacccacctcagcctcctaaagtgctgagattacaggcttgagccactgcgcctgttacactttccccattttctaattggatttttttaattgttgacttttaagagttctttatatattctagatatgtatgctttatcaaatttgtgttttgcagatattttcttccagtttgcaactggtattttcctctttttttttttttttttttttgagacagagtctggcctgttgcccaggctggagtgcagtggtggctggaatgcagtggcatgatctcagctcactgcaagctccgcctcccatgttcacgccattctcctgcctcagcctcctgagtagctgggactacaggcacccgccaccacgcctggttaattttttgtatttttagtagagacggggtttcaccatgttagccaggatggtctcgatctcctgacctcgtgatccacctgccttggcctcccaaagtgctgggattacaggcatgagccaccctgcccagcaatattttcctcttaatagagtctttcacagaacaaaacattttaatgttgatgaagtccaattgactgaattttttaactcatgaattatgcttttgctgtcatatctaagaactctgcaatttctctgatatcttctcctaaaaattttacagttttacaaatatatttatgatgttttatgggtttatttttgtattcagttatatgagggtttggctgaggtcagttttcttttttcttaagaatctccagttgctttggtaccattgttaaaaagacttcccttccttcacagattggtttttgccctttgtaaaaaatcttttggccctactgttacgggtctctttctgagttctttattttgccccattggcctatttgtcttttcctttgccaataccacactggatatagctgtatatctggtagacttattcctcccactttttgcttctttttcaaaattgtttttgctattctaattcttctgcctttacatattatttttagaatattttctctataggaaaatcttgctgagattttgaaggaatcacattaaacacgtaggcctgttcggacaaaaccagtatctttactttgttgtgttttccaatccatgaactctttatcactctccatttgtgtagaactttgatttctttctttagtatttttgtagttttcagcatacaagttctgtacgtatttgctaggttctcacctatttctgttgagtgattgtcagtggcgttatattttaattttggctttcacgtgttcattgctattatagagaaatacaattgggggtggaaggattggtgagatattggtcgaaggacacaaaattttagttagaaggaataagttcaggagatctattaaacggcatggtgactatagttaacaacagagtgcatacttgaaagttactaagagagtagattttaaatgttcttaccacaaaaagaaaaaaaatacatgaggtaatgtatggttaattagtttgatttcaccatttcacaaggtactcatatatcatgttggacaccataagtacatacaatttttattcgtccattaaaaagaaatttgtgctatattttatgctactaaaaaatacagttgttttttgtatgtgtatcttgtattctgaaacccttgctgaacttatttattacttcagtgagtgttgttgttactgttgctttgtagattccttggtatttcctgtgtagaccacgtcatctgcaaatagaggcagttcactttttcctttctgacttgaatgcctttgtattgatgctcaaattgcccctttcttgggtagcgggagcctcttcaggttgattcttgagttcttgtgacatgacgtagtctttgctttcttgctatatggtataagatgttctgggttcctcttgtactttttctgccctgacctataattaaccatttctctaaaatgtactggttcttttttgtggcaaatggtattttgagaccatagcagttcccccagtggagactgtagactgtagacttatagagccttgatagtctcttatatattagtaaattccccagtaagtgctcaataattgtttgtcagaagagtaagtgaattagtgaacaaatgtatgaaacacatctagtgctagtctttgcttggtggccaaaccaaaacaagaaaaacatcatccagtgtatccaaaaaagaaatattgtcaaggcaattcagatcattagtgatctgtcaaagaatgaccaaattaatggagaaccaaaacacttctctttaaaccctttttctccttccaagtcacctccttgtagctggcctggctcctttgccccctcttcttcctttacagagctattctagttttcgtgcttctctcctcagtgtgaattttcaaggtgttcctcctcctatagatctctgttgctaccacaaactgcatgataatgccctgaggtcaaagacaaggaaagactgcaaatgcttggcttgtagccctcccaccatcttcaaagtcagcagcgtaaactttctcctctgccagtgactcttctgacttctctctcactgctgggactttgtctcacatggactcacccaaataatccaagacaatcttcccatctttagatccttaacctcaccatatctgcaaagtccctttcccatgtgaggtaacgtatctctaggatgtggatgtccacattaggatgtggatgtccacattaggatgtggatgtccacattaggatgtggatgtccacattaggatgtggatgtccacattaggacgtggatgtccttgggggcccttattcggcccaccacgagaaggctcatgtgacccaacagacggctaaagagttgggccccagagctctgtgatgctcacccttccctgccttctccacccagcagagaccgttacctttatagaccctagcgaagaattttctgtggcctttggtcctttgcagaacttcacacctgttcatttgaatcattttgcaccagttacatactgcttgtggcaaacctaaaacgcctgtggagaaatgtgacgaggactaagaacaaatacatcacaacctatgaaaccacgttgcagttctctgaggagatgaatggagcaattacgttttatgttattgtgttgtgtttgtcatggaaatgaactgcacaatcattaactggcaggtggtggagacgggaaaagtagctgctgcccctttttctatttttatccagttttttcccgtttttatttttgtgtggggttgtctgggaactaagagtgatattacctaaatttgcttcctgcctgtatcttacgtgtgtattgttgtggttaataatgttttcaatttactcagactttctcaaaacggccctttttgagttatcgatagctgtatttcacccaggcaaatctgaagttgtcatcttattttctcattttagatatatcctaatgttaaataaaaaggaatttataaagccttacctgggaaagtccaaagttcttaccttttgagaaaaaaaaatctaccccatccccaaaggaaactgctttcattagtcttcatggacggaacccagggctcatagctctgcctcttattagcgggactgacagctgcctagtggagaaggtaacctccagaacagtcccaaagaaggccaagaaggcctgcctaggagggttctatcaggataggaaggggaagtgcttaacgctgacacacataactcgggtggtgtgggggctccctcttgagacccagcatgctgtggtatagtcgcgctcccggtagatggtaatgccaggggctgcctcaagcccaaagattcagaaaatctacccctgcatttcgtcaccagttttgtgatcccctctaccataggccaggcctttcttagccagtgggggtatctgattggagacctatagaaagggggagacagagacagacaaagacacacgaagacaggcacacagagagaaacagagagagtgggccaaggtgcagaactgttaacctcacaacaaaggtttgcacagattcctctccctggcatgttgtctcactgggtctggggccagggagatgacagagacaaccattaaaggacttgatgagagaatacatttgggatgggcacaggctgggaggctgggttagagtcttgattgttcatgttctttggcaaaattatttgacctctggtagcctctgcttcctttctgtaacatggagataataacagcagctaagcatttctgagttttaagtgtatgccaactgtatgtaccaatcaccttttaatatctcgtttaattctcctgccaacactaagggatggatacaattattatccccatctgacctgcgcattggtgctgtcagtcaagcatctggcccgttgtcaaagcgtcaccagctaggaagtgtcagagaagggactcccatgcagtcatctctggatccaaaccttgatgttaacccctggttgctgcaagggaatttgaatccctgtgggatgaccgtgagggctaggtgagatgcatgcagagcacacagcagttgccaggcccgtggaacgtgccctcctcatcatgacggcgaggagggcagagcagaagctttgtagagaagaagagttgacggggagcatggtgccccttctgagaagtgacaaacaactccaggtggtggttgagtgaggagcagatggagggtcggtccctagggaggtatgtccaaagccagcaggttcactccctctgaaatcctacacagaaaaatctcagaatgctgaaaggatgccagtgtctgtctcccaactgtggctaatggttcagtgggatttgcttactggcaacttctgaataattcccagcacaggtgtaaataatgcaaggcctcaatcccagcccgacctgcaccgtgaggcagaagagacatgtgtgtcacagttaaccaagggtgcagtaagccctcctgaaagctcagtttaggggaccaggattttaaagagctcccagccttgttgataaatcagtttccacctgatggctgtttgatacatcagtttctacctgatggctgtttgaccatttccctgtacttgttttccagaacagtgtccatcgtcacagagagtgatggcactggcgggctgtctgataaagcaaagaacccaacagatgttgtttacacacaaatgccatacctatcgtagtagcgttcagaaagaaaaaaaaatcattaaaaattggattttcatattgatttattttcatcttcattgttgatggtgtttgtgcgtgagcatgatctatccctgtagttaggggagcctgtgttttgagtcgtgcactgaggatccagcatcaccaagggttattaggctgttcttgcattgttataagagaatacccaagacggggtaatttataaagaaaaagggttgaattggctcgtagatctgcaggctgtacaggaagcatggtggcatctgcacctggggaggcctcaggaagcttctaatcatggcagaaggcaaagggggaggaggcgcgctacatggcgagagcaggagcaagagggaacgagagaagggggaggtgccacacacttttaaacagccagatctcacaagaagtcactatcgtgaggacagcaccaagaggatggtgctaaatattcatgagaaatccaccctcaagactctgatccagtcacctcccaccaggccccacctcccatactaggaattacagttcaacatgagatttggatggaacacagatccagaccgtatccctgagatcagctgtgctcgaggtgctgtgagtctgccttagccatcgcaggtgctcccgtctctgctgggcacagctttgtcactcggcaatcgaaaagagtcttaacacgagagtggaaccctttggtcaaaattatgctccttcaaagaggaacaaatgtggtgacagactggaaaggtgatggaaagcatttcaaaaagcagttcactctgctcataattttctagtattcctctgctattatttgcttttaaagaagagccctctgcttcctagcggctgctgcgtatgcttggtccagccacgaagacataatcctctgcgggcagcatcacgtggagcgagggtcaagtcctctgcctggtgcgcctttatctgcacaagggaagaaggaatcctgagtgcctcgttccgcagaaagtgagacacagaaagcatttgacttgtcaggaatcgagaattaccagccccaggcttccccaactcagctcacgaagtaagaatggctgggccaacgcttctctgcagaggctgcaggtgcggacaccgacagccatgcacagtcctcccaggaatattcttgtatctgctgtgtcttgcttagccatggccatatttatttaatttttgatggaattatttattgtgttttattctcttgctatataaactgagctgatttcagaattgactgctgtttgcagagtatcctggggagaggaggattcttcatgaggagcccccccatatctggagcagttttagttggtcctcatctactttttagacgcctttctgtcctcacttttcatggtttccaatttgactggattttacactcttgggaagttccactgtttaaggatctaaagactgaaaacatgtattccgcacattttgtttaaatcatgtttcttttttttttcctggaatttttattttagcagaaaaagtcttggctggaaatgtttctgcctaaacctgggctctgtaaaaactcctccttcatgccgttcctctgcatatgaccacaccaggaatttggcatagccatttatttgtacctagtgctgaaacaattagttaaaataacaaaaggcccctggataagtacaaattgactgaagtgcttttgaagattagcaaggaaatttaagaaacattgctataaataaaaaatatatttattctgggcaaaaatccctgatgaaataaatccttcactagttacatcaacagttaccctataatctcttcatttcttttctgtccctcctactagacagcatctttcctaaaggaaaagaatcaattctatttatgacacataaacacatgtggagaaaaggccagggattttccagcactaaagtcttgtaaagtggattttaacgttcgtggcatctgggtggaagtatccgaagacaagttgtttctaggcctctttgctaaattattacatgtacgctcttgagcagatgggctttgttttaggtaatagaggcttctggtcattttatgactctaatgtgataattcagtgaccgagctgtgtttttacagaagcctattaactaaaactctaggaagtatttgatatttagcccctagaagaggacagtagatgacatttactgttttcttacttgccagtcacattctacacctgatgaaccagattcagacttagcgtacatggaatttgtagcttctgagccagcctcattcacctcactaccgatttgcacttcatcagtgtccttttgatgtcagaattgttatccccattttacagatgagaaagccaagtgatgagcctgtgggagtaaaatcggggccagatccagttccacttctcttgccccacccaggtcacagttgcctgatcgcgttaagggcctctctatattaagacagaatatcatggtgtcattgatggtgttacttcctgtcaactgtgatcatcttgttctggtagaaaagtgaggtgtcttctctgcagaccacattagattttaactttaagtcaggttcgacactacttctggttccaggaaactcagggagcttggttgggagaagatgcaagagctctgagctcacatcttctttgggctttaattcagagaccgacaatatgcacccaggcagatgtccctctgtgcctcttttctgaccacccaccaaagcccctctctgctgctgctgttggccatggtgctgggagtagtcagggagccccaggccagccccgcagttcaggagggagttggatgtgctgcctggccgtgcagaagcccccggccagagctccggtggaaggcacgtgggtagatggtcagcagggatggcatttcctcccacgccacctgcagaagcagccattctgttcctgagttattaataccttgtaggctagagaactgggtctgtcttgctaatgtgatatcccatcagatttttacactttcaaaagctatcactagggaaacagatgtggttggacctgcgtgctttgtggtgactttgctgcctgtgtggcgtatctacttttcctctaaaactctgtaaaatgaacagactggcttcacacacttcatactgccatcatttatctttttatgcctttgcagctcttgccagtaagatatccccttgtgttcaacaaccatattttccagtatgtcttccctggacagtgttaacacacacagtaggcactgcaaagatatttagaaaatggttaaattactcctgtatttgcttgggttccaggtgcctgaatgtgcaagctcagaaaggaatagtcagagtaaaaatgcaaatacaaatacttagagattcccttctttttcttcattaatttaacacacatttatcgactacacactgtttggctctgtgattaaatactggaggatccttgtgtgcagggaaaacaaaggtgtatctgaacgtatttcaaatccaaaggattttaaaggagttaccattttagaaattccaccctgcaacttaccaccgcttgggtctatatttaagagttgagagacagtcaatatagaagagttggatagaaggtgaattcacataaattcaatggaatttttccatatacttgccattatgagattaacaatgactctcctagaaaaggatgcccgcgtagactaacttgaaatgtttttcaaggcatgggccattatggtaactaaactggtggaggcttgactggtcttttcctgcctctagtttcttccctctctggtcatcttttggtctttctcctactgcagaagtataacttaccctttcctgaagaatcacagttctgaagtttaatggctttctcctctgagcaagcctgcctgcctgaatgcagttgtgctgagctgcaatcccatttgcccaggacttcttggtctgtgctagggattcatgcattccattaatgaacacaactcagctagtggtttctgttggtttgaaatcacgagaaacaggtttcccaaattctttcttcttttgcttttaagatgtttttcttacacccagagcaaatggtcagcagcaagtgtttgctcttgatggaataaacatatcactctggcgacttaacatgtactgagcattcagggactcattagtgccaaaactacttgaaagcaattttatttttatttatttatttatttatttttattatactttaagttttagggtacatgtgcacattgtgcaggttagttacatatgtatacatgtgccatgctggtgcgctgcacccactaactcgtcatctagcattaggtatatctcccaatgctatccctcccccctccccccaccccaccacagtccccagagtgtgatattccccttcctgtgtccatgtgttctcattgttcatttcccacctatgagtgagaataggcggtgtttggttttttgttcttgcgatagtttactgagaatgatgatttccaatttcatccatgtccctacaaaggacatgaactcatcattttttatggctgcatagtattccatggtgtatatgtgccacattttcttaatccagtctatcattgttggacatttgggttggttccaagtctttgctattgtgaataatgccgcagtaaacatacatgtgcatgtgtctttacagcagcatgctttatagtcatttgggtatatacccagtaatgggatggctgggtcaaatggtatttctagttctagatccccgaggaatcgccacactgacttccacaatggttgaactagtttacagtcccaccaacagtgtaaaagtgttcctatttctccacatcctctccagcacctgttgtttcctgactttttaatgattgccattctaactggtgtgagatgatatctcatagtggttttgatttgcatttctctgatggccagtgatgatgagcattttttcatgtgttttttggctgcataaatgtcttcttttgagaagtgtctgttcatgtccttctcccactttttgatggggttgtttgtttttttcttgtaaatttgtttgagttcattgtagattctggatattagccctttgtcagatgagtaggttgcgaaaattttctcccatgttgtaggttgcctgttcactctgatggtagtttcttttgctgtgcagaagctctttagtttaattagatcccatttgtcaattttggcttttgttgccattgcttttgctgttttggacataaagtccttgcccatgcctatgtcctgaatggtaatgcctaggttatcttctagggtttttatggttttaggtctaatgtttaaatctttaatccatcttgaattgatttttgtataaggtgtaaggaagggatccagtttcagctttctacatatggctagccagttttcccagcaccatttattaaatagggaatcctttccccattgcttgtttttctcaggtttgtcaaagatcagatagttgtaggtatgcggcgttatttctgagggctctgttctgttccgttgatctgtatctctgttttggtaccggtaccatgctgttttggttactgtagccttgtagtatagtttgaagtcaggtagtgtgatgcctccagctttgttcttttggcttaggattgacttggtgatgcgggctcttttttggttccacatgaactttaaagtagttttttccaattctgtgaagaaagtcattggtagcttgattgggatggcattgaatctgtaaattaccttgggcagtatggccattttcacgatattgattcttcctacccatgagcatggaatgttcttccatttgtttgtatcctcttttatttccttgagcagtggtttgtagttctccttgaagaggtccttcacatcccttgtaaggtggattcctaggtattttattctctttgaagcaattgtgaatgggagttcactcatgatttggctctctgtttgtatgttgttggtgtgtaagaatgcttgtgatttttgtacatcgattttgtatcctgagactttgctgaagttgcttatcagcttaaggagattttgggctgagacaatggggttttctagatatacaatcatgtcgtctgcaaacagggacaatttgacttcctcttttcctaattgaataccctttatttccttctcctgcctaattgccctggccagaacttccaacactatgttgaataggagtggtgagagagggcatccctgtcttgtgccagttttcaaagggaatgcttccagtttttgcccattcagtatgatattggctgtgggtttgtcatagatagctcttattattttgaaatacgtcccatcaatacctaatttattgagagtttttagcatgaagggttgttgaattttgtcaaaggctttttctgcatctattgagataatcatgtggtttttgtctttggctctgtttctatgctggattacatttattgatttgcgtatattgaaccagccttgcatcccagggatgaagcccacttgatcatggtggataggctttttgatgtgctgctggattcagtttgccagtattttattgaggatttttgcatcaatgttcatcaaggatattggtctaaaattctcttttttggttgtgtctctgcccggctttggtatcagaatgatgctggcctcataaaatgagttagggaggattccctctttttctattgattggaatagtttcagaaggaatggtaccagttcctccaaggatacccaggaattgaactcagctgtgcaccaagcggacctaatagacatctacagaactctccaccccaaatcaacagaatatacatttttttcagcaccacaccacacctattccaaaattgaccacatagttggaagtaaagctctcctcagcaaatgtaaaacaacagaaattataacaaactatctctcagaccacagtgcaatcaaactagaactcaagattaagaatctcactcaaagccgctcaactacatggaaactgaacaacctgctcctgaatgactactgggtacataacgaaatgaaggcagaaataaagatgttctttgaaaccaacgagaacaaagacacaacataccagaatctctgggatgcattcaaagcagtgtgtagagggaaatttatagcactaaatgcccacaagagaaagcaggaaagatccaaaattgacaccctaacatcacaattaaaagaactagaaaagcaagagcaaacacattcaaaagctagcagagggcaagaactaactaaaatcagagcagaactgaaggaaagagagacacaaaaaacccttcaaaaactcaatgaatccaggagctggttttttgaaaggatcaacaaaattgatagaccgctagcaagactaataaagaaaaaaagagagaagaatcaaatagacacaataaaaaatgataaaggggatatcaccaccgatcccacagaaatacaaactaccatcagagaatactacaaacacctctacgcaaataaactagaaaatctataagaaatggatacattccttgacacatacactctcccaagactaaaccaggaagaagttgaatctctgaatagaccaataacaggagctgaaattgtggcaataatcaatagtttaccaaccaaaaagagtccaggaccagatggattcacagccgaattctaccagaggtacaaggaggaattgaaagcaattttagttcttgtcgttgtacagctaaggaaagttcatcagtttctaagttgtctgccttgaacttgcttaaattgtgaggcatgagatccagattatactcagaacactaagccttggaatcaacccttttaaaagttgcttaattaaaatggagaatattttgaagtggtttttttttttaagattttacaaactaatattctgcatcttcctgcacgctgaccttctgttaatgtacttgaaggtcaattgaaactagtcaaatgttactttaaagttcgtagtggtaaaactatagactcaaattatgcttctatgtttaatgggcaaagttattattttactaaacattttactgaattttcatcataatgtataaattgatgtggatattaccaccctagtttgtggtaagtgttaaagagcaaaatacttattgataaccaaagacaatttatattttcatggaagccaacggatgggttacagtgcaagttttgggagctcatcatgaaaatgttcacatcatgaaaatatttctggacacctcctggaactcttccccttgggtccatagatactcttaagggaaagttgttaaagtgccccctgttacttcttacagcttgtaagtacacccaatcgaagctctatgggacatgaacagtgtgtcctggttcaggttagtgtctcctccactctgagcagggagtgggatttccaatagttgctgattaaatagtgaaacagttacttgattctgctccagtggtgatcagggtgaatgtatactcttactcttccttcctggtcttcaggcacctatgcagtgcccagtgggctgttttcaccaaccataaatcctgtgcttccaggattccgacgtcagtatcacatccctgaaggcagctgatctggtgtggtctggggaaggccacaacccctggccatgcaaacatagcagggagcttcccagtcgatgcctagcaaggtggccctccctcccccatgcccaaggggtgggtctagccatcatctcaatgcaggtggtcagagacccagctagctactctcttcctcggatttcatcttttctgaaatagagaactatgattttgcctagcacctcaggagagtgttggagaatcaagtgaagaatggccagaagcacttagcgagtgctcactggaaatggtcttcctttactgaactgcacagatactttgctcatcagtctcagcaatgaaaagcaacagattgatttctctcttgtgaaaacccttcctgtgcttataattcgtacctcaggaccggttagcttgttctttatgatgtagcagtgtcttctcccgagcggcagctcatctcatccatattgtactcagttatttttgttcctcttctctttactactatcccatggaattgggagttaaaatgatgaggtttcatttttaaatgtacaaagatgggggaagactaaggaagtaattttatttaaagccacacatacatttgtttcaataaagttaaaggaaaatctctcaggccaaatattgtaatttttctatgaagtcagtgtaagttttaaatgtgtcatctggagctatgttataataaggccaggtaattcatattatgggcaaagtattcaactttgctaccataattactcagcatgcccctgtgttcttttcattaccttctgatagcaaaagtgatatttattgtggaaaaactggaaaatattttaaaaggtagaatcaaaaggaaatggcctgtaattgtaccactcagactaaccactgttaaccttttatgtgtacacacatatgtagaaacagatacataggacttatttgcagtgcatagaacccttaaatccaaaaaagatgtcatcgcatgtgctgttgtgaatctgtattggagtgttttgatttctagtgacagcagccctaacttatcacggttcaacaggaagtatctgagctcatgaaccaggaagtccccagacaggacaggctgctggatggttggttcattggctctatgagataatgaaggacccaagtgctttccgttctctctattctgctgccacaattatcagcttcatgtgaaggtcatttctatcatggccataaaatcaccaccatgaacacgttggacaaaatgatcaagacccacacctgatgctgggaatggggccagctctcttgtgttgcatggctggattgcagggggaaggcatggttgccacgacaaaatcagggccgctaagaaagaagacaggatgggcacacgatacttgctttagtgtctttaaatatggttttcttcttaaggtttacagcagttaccagaatttaaaattaagatgaatggttttggatgttttattttcatttaaaaagtcagtctcttgtagaaatgctctgttcagaaagatttggataggaacaaagacttggtttctgggaaattaatcttcatgatctccaaagatgtagcattttcatggtgtctttttggcagcagcagttttttttttttcatgaattttggcttaaacctttatagaaattaaaaactaaaagaaaaagataagcttaaagataaaagttataatagatggaaactttaatatttttatctttatgtacctttttattttcaatactcttgaaataatgccgtaaataatatcgagaattcatggatattttataaggatacttctgagaaacaataggcatatttgaaattactatggtaaaaatcagatgtcaaagaaaaagttatatattcagtttttaaattgtactattaaatgtgtaacttcatgtgtagtaaatattcatatttaattttagctgccagtgtaacatatactaaaataaaatggaacaatttctatggttctataaaagaatctataaaggagtcataaataattataataaaactctattgaaatatttttatgagactaaaaattgaaaacttcctaatagggaaattttcataaatgagacatgaagtaagtcatagagacctcaaacagtaatatatcctatgggaaccctgaataagcaataacttcttaagataattttatataatgtgtaaaaatcaagagtttttgaaaaagctctgcaaaaggtagcaggaagaaaaaggattattataatgctaaaattcctcatgagagattactcattttgcatgcttttgatgttaccagaatacagattttagataatctgaatctgaaagtgctgtaactattccctatagagtaccacaattgtggtgggtaacacaactcactctagagacctaagatgtttctcttgtttttgaaataagagcttagactaaatgatattttggtgctcagaatgcatcttaccttctatgccaaattcaccagccaatgaatagtttactcacattcatattttttttctttcttttttgagacagagtcttgctctgtcaccaggctggggtgtggcggcgtgatctcagctcacttcagcctccgcctcccaggttcaagcgattgttctgcctcggcctctgtagtagctgggactacaggcgtgtgccaccacgccgaactaatttttgtattttcagtagagatgaggtttcaccatgttggccaggatggtctcgatctcttgacgtcacaatctgtccacctcgccctcccaaagtgctgggatcacagatgtgagccactgcgctcagcccatacttttttaaacaaattttaccaccctcatccacctctttaactggcaaaaagaatacggaattataagtgaaggatcccataaaacacccatttcaaataaaagttccttggatgaatggaagttgtgtctttcttgtttttattcttttttaaaaattaagtagtataatgagagtctttctatggtatgattggatgagtattaatctgcctgtgaaaacaccttctcccttctctgctgttaagttgctgtgttacctaagacaagcaacttaacttctgtgagcctcagtggcgcagagaaagggcaggtgcattaaacgagtctcagagatgcctttcccagtagaatcaggatgaatgagaaggtcttggtcacgatcaagaagactgtttactcatcctttgcacttctaagacatggtgagatagtacaggtgaaaaagacgtggcctggagttaataatgatggtagaagttaagttgaaggggggcagcactgtgcccattggcgactttccttctacgcaccagtgtagatatccatacacaaagcctctgatgaggctccctcgaggtggagaaaaccacaactaattcacttgcgctgggtcagggttgtggtggtccagccttctaattgaagggattccttctaactggtcttgttatgcattctcagaggaggaacctctgagttttaatgaactctggatgtctatgttccagaacattgtcttcttcacagtcaggtgctggcgcagatgtggagcacccggtaggctcagacactggggctgcagtgtgccagctggatcagaagaggctctctctggcgttgtcgtattcttaaagtcggcctgtgtattgtttttgtccttccagctcttcttttaaactctaggcattcctttatagttggcctaattaattttgtcttacaagtaggaagttccctggagtagctttgacactgtcctcttcttttctgaaacagagccatcacattggagaatcagctggtgatcctcgccaccacaaccagtgatgccggggcatactacgtgcaggccgtgaatgagaaaaatggagaaaacaagacaagcccattcattcatttgagcatagcaagtgagttttgaaatcccaaatggtaattctgcaagcaataaaatcttgctttaatcagtaaccactgtctgacaggacattttgcaataaattttctctctctagtgtagtagttacggtttaatattgatccagtgccaatagttcggagagctttagggctcttgctttcttcaaaatgatatgcggaaaaatgtgaatctcagtggtacttctgaatgccagatcttttttgggaattaaaaaaaaaagtatttgctttttatacacagtcaatgcatgttgttcctaacaacaaagaactttcaatttaaatgaattgtatccatgaacctaaatcaggactagattagatatacattatattcttttaatctaacaggaaaatctttgagaaattctacctattaagttgtacgaaaattagcagtatttaagcataatcagttgatcattttttccacctaatttaactgaaagcctgattcttgaagacaatgcacacaaatcatgggtatttgtcgattttatttgaggggactttagtttgagtaaacttagttttacatgtttggactttaaattctactagcaagagttaattgctaaagaagggaaaatcacccaaagcaggaactctgaactaatctagattcagacatccatatcagaaggcttgtcatcagatgtttgcagcatgaagcttcatggtatgaaatgaaattgtcatgcggttgagaaaatagggttgaaactagtcatggcggatggtaaatttcaaaatattattatcatatcatatgagtgaattatattgatttgtttgtatagtagtggattttatctttttaaaaattgtcttgaaggaatcgtttcccctgcaagtgatttgaaaagtatgtggggctaggcatggtagctcacacctgtgatcccagcaatttgggaggccaaggcaggcatattacttgaggtcaagagttcgagaccagcctggtcaacatggtgaaaccctgtctctacaaaaaatgcaaaattagcaggcatggtggtatgcacctgtaattccagctacaggggaggctgaggcaggagagtcacttgaaactaggaggtggaggttgcagtgagctgagatcatgccattacactccagcctgggcagaaagaatgaaattccatctcaaaaagaaaaaaaaaaaaaagaaaagtatgtgggatggagtgatagtatttgcctgacatggccctcgaggggtacaattgccttaggcccagtagaattgcctgggtgaatctttgtagcaaactctgggtgcaggcgtctgtgggagttaactgagtggggtctcagatgcctgcctaattggtcccaagtggccgtgatgtgctgtcatcctgccttgagctccttaatttgaggaattgaatctcgctctgcagaacgtagacttggcacagatttaggatgagtggggtctttgtgatgccatggagaatgatgcacgtggattaggggtggggttcacaaaacccagtgcatgctgtactgtgacgtaaaggagtgtctgcattgagaattacagtagaaatgaggatgatttattaagattttttccaagggttatgataaagaatggaaattgtattatcaaatagattgttattattttaatgattccaaactttacaggtagagccatttatcttgtttagcaaatatgaatctgtactcaattgtaatataactaccaggataataatgagtcaaagggggtgaaattctgcatcagaaacaaggaagttggccttcctctgttagaagaattattccactgaaactgtttaacatcacaaagttataaaacagtccgtacctagtacttgcctacctccctactctgtaagggccagcagaaaataaagcgagtacagtgaatttgcaaaccgctgtactagcgtaataccatggtgttagataattggaatatgtaaatttttttcagtaatttcagtttctaccctgaccgaaaagtatattgaaagctactcataaatattataattaactgggttgcattttgttcctttgtatgtattttttaacttttcattggcaccaggtaaaaatgtgtaaaaagtgagatacaaggcagttgatgatatggacttattttaaatcttaggacaaaacctacattttgttcctttatgaattctttgctttttatgagtgccagataaaatgggagaagtaaggagattgaggaaactgccttattttaattcttaggagaaccttcctggtgacatacgggatttacgtaaatgttaaatggcaaccaattatgcttttttgtttttttgtgttttttttttttgtttttttttctgctaaaagttttattttgaaaacctctaaaagtcagaagtcttgattaatctgcagaatcccccagaattgttttaattgtgcttctttctggcatccagtgagggctctaagcaatgaacactgcagttcaggacctggccaccctgctcctggtgagggtgtgatgtattgaaggatgcgtctcttcaccagatttattatgaaattagatattctcaagacctattgatactgggagtaagatagagtgtgttctgcagacttagatatctttttcttctgatgtaggcttttgtggaaacaccacacaagattgaggaaaatttgtaaaaactttctggccagcgtttctgaaaaatcaaaagatattacagccaattatcatttaatgaagatacatttttgcttgctgtcgggagaataaagcagggaacctttatgtagtgaacaccatcgggatgatcgggtactggtaattaaattcctggtggattgtgctgtaattagtttaaaatcggagtgtcatgcagccccgcctcttgtttgctgttgtggtaataatccgttccttccttgaggacagcaccgtgttagagtggagcggcaaccaggtctagccctgtctcaaaacatctaaataagtgatgcgctgtcacccagctaacaggaggaaataatacattttcatcaacaaccttgtacttgagagttcaaaaacgtcaccccttttcaattgctagatactgtggctacacctgaagcttatgggaagcaaaagatagataggttttagatttaaatttttttttaaagaaagcatgactgttagaactgagatgcagtcccataatggtaccgcctgctgtttagtgcatatttagtagatggcattattatctctcaacatttctcccctcttgcgtggttaagaagataaattccagcatgttctgaaccgatattcctgtagggaaggagaggatttccctgaactctccaccccgctgccctggtgagagcttgctgccatcccaggggtggatccactttgaagttttaatgtgatgtgaagccagcagatgttaaggacataggtgggactgttgaagcatcctgcatgaatttttcatggccagctcccactgctcaggtgcacaccagaaaaagaagggtttgggcctgcctgagagtagatgtgtcttccgaggtcagacccgggaaagctttatgaacctgtcaacctatttttggcttttgctttgaagattttacgttgagttaacctttgtggaacagaacttctgaactgaattactatgtgaataagagtttcttcctctaaaaaaaaaaaaaaaaaaaaaagccacaggcgatgagacgaattctatacagtggttaatcagtcattgtttatacgccattgtacatgccttagacataccatcagttctgatccaatattcaaaatgtccaatgtaatgagattctctactagggatgaagcttggattaaaaagaaatgactgcctctctccttcctgtttttttcacctctttcattttaatgtctcctcttcaaacaacatttgcagataggatatcatttcagctgatcctccttcaggctgacaaacccttgcttttaattctgaagaccacttaacattcttttgtcctctataatgctaatttaactgcagactcacgtagggttagtagttgaaagtggattcctgagaatgtccatgaacagtcatttcagaggactgccctgtaaaacatggcttttgtgtgcccaggtacaactctctcctattttccttgtaccgttaacattaaagggagagaggggaacaggcagatgccttccagatggcctctgacttggctcgggttcctaaaacaataggaactgtttgaaatattactaaaaaccaatctggggcctagccccacatcacaaatgagcaatttagaaccaagcatagttttatagattgtatgacactttactgccagaatttttcagaaacataaataggaagtctattttatagtcaagtcatgagtttaatcatttagccatgcatcgaacctgctgtacggagtgaagtgtgaggcatgctctgccctggcctcctgagctggtgttggacagaactaagtctaggccatggtccctaatgcttttccgtaaacacaccatcaggaaacaagccttgagcatttactccttatgcatgaacacctagttacttatcaattctaagcattaaccatcagacagaagagaggacgggaatcagcagtgctaatcatgaaggttccgttccgtctttacttgacgtctcatggcgcaatatgcactttgtgaatggaaatccatattttacttgattttcttgatacaatctagttttttggaaaaattcttatgacatctggttacagataattgtttcttcttggcgacgtggcttctactaacgacacaagtgttcctgctgccgtttgttgccatctgattgtgctggtgttgtgagtgactcagatctgtgctttcttcccagaaatgccgtcgtcttcagttgtccactttgtgagagttagtttagataaaacgaaatacacaaatacataaatccacctctccgggcaaaggtgaaactgcatcccatgcctatgagggcatcctgtccacttctctgacaatgagaattttcagacccttccttgggatagcttgcgtacagagtgtcacctggggccacctgaccaacagactcaacctgcataataaataacattgaaacttagtttccttcttgggctttcggtgagaaaacataagttaaaatactaggtctaatatttcgtttctgcgccccaaatggatggattggggaatgagttttagaagaggagtgtagctggtggctcccagcaagacttcactcaccacaacaaagaccatcattctctcctcaccccacaaggcaaaaccggatggtttctattgcccactcatgcctccttcaccatatccccatctctttccatcccaaggtgtccccttttcccctgtgtgatttatttcaacctgatttcactgttgttaaatcttaggaaatctaatctgtcttaaatcttaggttaagctatgatcatttgccctcaaagtttgaacacatatgggggaagctcaatatgcccggtttcccaaagcagcagtcactggtctgagtatcactcaggatacatatagatttccaaggcgtaggcaggcatgtaaaatttccaaagaacctattttcagtcctttcatattcacattctaaaactggatctgaggatgcctgaggtcaaattttgcaactgctcctttctttccgaacgagatggaaggctcgtgtcttactcatcctgaatctttaacatgggcaattatctgagggtgtaaatgcccaggtgccaaccaaagggagaattctaaatatcaggggcagaattgagaaagtgaaagactctgataactgagagataaatgattttataaatcaggtgttttcaatcttttgctgtctacaaaacgaggtgggacctacgtgtgttgtcagctgacacttcattacaaataacttgataattactaactgtaacacagtccacttgttctcaggacggaagagatttctagcccctttgcaggtgcagggccatgtcagtggaataaagtgtcactttcaggccatgtgtttaagagccaatgtgttaccttcatgctctccctcccctttggggacaaccatggccaggccacatattgagccacaagatggaagctgtctggatatttgaatcagtacaggggaagaatagcctgggagggccacccaagcagaattggactcgttatgagtaagaaacaaaccttggtatgataagcagtgagatttcagcatttatttgttattagaacaaagcacgtctgtcctaactaatacattactatatgacaacagggcgcattgcctcacgcctgtaatcccagcactttgggaggccaaggtgggcggatcacctgaggtcaggagtttgagaccagcctaactaatatggaaactccatctctattaaaaatacaaaaattataactgggtgtgctggtgggctcctgtaatcccagctactcaggaggctgaggcaggaaaatgaattgaacctgggaagtgaaggctgcagtgagccgagatcactccactgcactccaaccaaggcgacggagcaagactctcaaaaaaacaaaaataataataataaataaataaattactatatgacttttggcatataacttagaaggaatttaaaaaattgagagatattctataacaaaatttcttccattttcatctgttgctttatatgaacgaaattttatctatgaaaaagaaaagattagaattaaactttattcctcatgtcattgagagatgcatttctagttttttaaaatataaaacctattcatcaaaatttgtaatactttaaaaaattaattgaatgtcaataataattgtaacaataactcaatccaagagaaggtttgttttggtttggtttgcccccgagtcatatggttaaaaacatttttttaagaattttttgttcttttttttttttttttgtttttttgacacaaggactctgtcacatggactggagtgcagtagtgagatcatggctcactgcagcctctaacttctgggctcaagcagtcttgctgcctcagccttttgagtagctgggactacaggcatgaaccaccatacctggctaattttttaatttctttttttttgtagagacagtctggctatgttacccaggctggtctcaaacttctggcctcaaataatcctcccaccttggcctcccaaaccactgggattacaggtgtgagctactgaaccccaccaagattgaagtttatacgcatagttttttcagaggctgtgatatgattaatacaattctttgaatcatgtgttttttaaatgggtgatgctgtgtatcaaatgtttagacgtgcttatcaaatatttagattcctttgaatacatatagatgcgctgcggtagttttattaaaatatactgaaatagtaaaacattaaactataccagaaattatgttctttttagtccttcaaatttatgatgaaaaaatggtagatgtcagcttaaaatgtaagaaagatacacagttttacaaaattgttttaggtgatctaggaacaacaactgtttgaagctatatgcagatgtgattataaatcacacatgagagtactgttgatgaccctctaagggcatacagagaggagaaggccctaacatgtcttgagacctgacagatatcgtcacgtatattttccttcttagattccacgacagccctgtgagttaacaatcaactctgtttcaaagctgaggacactgaggctctaagaggttaaattattgacccagatcacaagaatagtcaatgggaagtttgaggattcaagccaaagtttatttgtccccctcccaaaaccctcgtttctccaatgaaagcagaacaacatataccatggaggctgggtgtgctcttgaggtcaaaacgtgtccaagagagaagcccaaggagaaggcaaaacttgggaggaggccatccagcaggaaggctctctgcgaagagctctgtgtgtgcagacctcagaggagcttggttttgttttaaaaaaggaagtcttctgttctgatatcaaaaccactcccgatcaacattcattccagagaacagcagtgtgctgtggctcagcagctttgaggctggcacccttttgcaaccccagtgaggcacgtttgggcggacagcaaacacaggtttggctcaagggtgcagtgggagatgcactggagtcagtgcttactaatggagcatcagaacaataagtcacaatttctgataacaaagtggttgttttgttatcagtaatgcattagacagcacataggacataaagtaagacatgatctgtcccagtggatttatatgactgatgtgcgtgattacactccctaattcccagatattgacatcgaactgttgtggcagattttgcacagtgagtaaacttcacccagggagtaaggcaagcacttggagaattaattcaccaagcagaactgaccagttgggttcagcagacggacgatgagtattcatttacgtctcccaattatgctgcgattattgaaagatacaaattattcagtagtgatttgcctaatcggattttttacaaactcctccacatagctcattgttagtaattcctccaatctaccttcccttctgtccccttgttaaatgtctcaatttaaattattatattcagatatttaagcataagagttctttaattttagcagtttgggggctagaacttaaagtaaccctaattttgttttgttttgttttgtttttggagacagggtcttgctctgtcacccaggctggagtgcagtggcacattcatggctcaccacagtctcaacctcctgggctcaagcgatcctcccaccccagcctcctgattagctgggactgcaggtgtacaccaccacacttggctaatttttaaaaaatttttgtggagacaggatctgcccattgttgcccacgctggtcttgaactcgggctcaaacagtcgtcctgtctcggcctcccaaagtgctgggattacaagagtgagccactgcacctggcctaacaatttttacctttgattttggaacctaatttcttagacttagccagcagcgaatgcctgatttcagtttatagggaattgaagataatttcattgtggaatcatattatgtaaacataacatttcagagtatgtaatatattgagagtgacccaagattataacttatgcattttctttctagctcttatcactctagatgtatagtcattgaagtactttgtctactctccttgtctctgtaattgatatgaaagataaggaatttttggagggcacaaacaagggggatggaaaattgaatttttcctgcagtcattttacaatctctgacatacatccattacacagcttgtctggaaaaatcctaagcaaagtgatggttattggccgagatgagaccacatagaacaagttgctagttgtaaatgtacttttcttagaaaaactgtatttactcagtagttgaatacagcgatgattctggtgaatttcctggggttcagcttttagttactttctagactaaatggttctactcgtaccttcccagtatgatttttccttttacgaatgagttcagtattctgaagctgctaattaagaaacacctgtttaatttcccttccttcagaattcttaaggttttcaaaatccagattgtgtgagttgctaggctaaattgtcttttcatatctcctctttcagaaaaatgaaaatatattattttctgattcaaagggagcacctagagtggtaccaacctcttcaatcataacatggtatttttgctgagtgtaggcctgatatcctatggtttaacttcagtttccaattttaaggacagaaagatgtgatttggttcaaagcataatgaaggcttattgtagtaatagtaacaacagctgttcattggatgtctgctgtatgccctgtatgtaaatatcgtatctcattaaaaaaaaaattaatcacccgggcatgttgactcatgcccagtgctttgggaggctgaggcaggagcattgctcgagcccaggagttcaagaccagtctgggcaacacagggagactctgtctttaacaacaaaaacaaaaaaaacgtgccaggtgtggtagtgcatacctgtggccccagctgctcagaagggtgaggtaggaggatcacttgagccagggaggtcaaggctgcagtgagctgagatcacaccactgtactccagcctgggcaacacagcaagaccctgtctcttaaaataataatataataatcataataaccaccatttaatcatcgtttttaataaacaagaggccataaggtcagtattatcccctttttgcagatgaggtaacaaatcaaagcaacaagttactttcactaatcttatgcagttgattacgtgggttagttttgaacccaggtttgtcttttccccaaagagactttcaccattttacttattgagatgatttatatcgcagaactgtttttgatttttaaaatcatgttgtaatttcttaatctggctgctgctgtagtgaatgcagcctaacgattggtcaccttttggtagcagttcaactccacctttaccacttagtcataatgttttattactgttcattgtaaacgatgttcttttggctcttgtagaaggcaattacagcaggtaattaaaattgtagttctttacaatgtgtttgagaatattaaatcaagcccacagaaaatcaggtaaagtatctgttaaagtgaaaggccacttaacaatgctgaagaccattagcaaatccagagtgctatattccctgcttttccaagaacacttcgtatctgagatgtaaagaaatggaatttatatcagaaataataggaaccagaaatttatctggagatgtagattctttctgtgtgttctaattagtgagttcttcgcaatagtctctctctctgattctttgttatttcaggtaattattctgcctgcacccctttaccttttatgatcttgaagaataccctgtttagcacaaaattagttccttccaatctagtatacctctatgtttggctgagagggtcttaggaaagtataagaaagcctgtgacctctgcttgtcagtgtaaactgttattttgcccaggaataactagcaagtgtagctttttgagacggataccaaagatattattttatgtagttttagagcatcataaaaatgtgagctgggaattccctagctcacctcagtattaggcctgcatgaccatctgggaagtgtgaaggctataacggttttgtggtttttctagggaggaagatacaaatgtcaaaactggaagtgcggaactctagagaagctcttaaaagaatgaaggcttttccattttagttcctaagtcgaacttaaagagtaggagtcagagctgacataagtcagtaatggcgagcatccggctggccccgtgcggtagtttgctgtttcactgatgatgtattttgttgaggtgtgtcccatctgacattaacggccatgtctggtattaaatgcccttctctttctccaacaggatgtcactctgtggttctattaattcagacagggttgaatttcacaaaggcttgctttcatttgggaaagttttcagcacaagtgtactccagaattcaaacttcttcctttctaatccttaaaacattgggatgtaaagaaatggaatttatatcagatttatatatatcagagacttatatcctcattagtcagaatgatgtaggaatagaaaccatatgcataggttgccctttggtgattggttcatttccgaaagcttaaggagtttcatacttcgttagcctactcaagaaaacttcacttgtcttgaactgagaaaatgccacatgcaaaaatggtaccatcatatttgaaaatgtatgaagcgaataggcagtattctgagtcttttgtttctttgttcattttacttacagtgtttgtaaaaaccatgacagcatgttcttgatgaaaatctaggaagcagttctacttgaaccctagcctggcattagatgacctggatcctattcacctcttcagtttgcacttgaaggatggatattaagccatgttgcccccactggcctccattttgattggctagtgaccctgccatgttactacagattttgaatatcatctcaacctggaaggatactgagggatgcatataagagtaaacttattatagagggaaacagctggcatactggcatcagcctacaccattttcaatgtctatgtagaagaaccaagggaagggttgaagtatgattttctttggcttttagagtctctgtctcacttctgtccctaagtgtatgattctccccaactccctgccctttaaacactcagactacagttctgctattccgctcagaaaacgctgagcgtctgatacttatcaggcattacgcttgatgccgaggacacttggtgaatatgacatgtggttcctgccttccctgagctcacttttgccaggagaggctggcgcaccaggaaatgacaggaacacagtgtgttaaatgccacacgaaagggagttgtgtagaagaagcttccgaagcacaggcaagggaacgatgaattctgcttccgatgctggaacagctttgttagcagaactctgaaaatcttttctttcacgtatggagggatgcaccagcagtgagatgattaggaaaagggggttggggtagaacagcactgtctatgaccgggaactgccataaccaccgtcctttcatttgctcccttgttataaatatcagtgccccccaggaagactctgcatttaatacaaccccattccaagagaatccttattgataattgtttttcatcacccactagaacgtaagttccgcgaggatagggatttttgcttatttccgcaagccacgggaagagtgcatgacgagtaataagggctcagtaaatacttgtccagtgagtgcatggaagcctgtgaagtgaggcctttttaccctccctttcctggtcccctctccgtccctggcatctgaggatgctgctcaccggcttgttcttcctgtagctccttttcttttggtgtttattgctccttttggctctcctcgtcccaagatgtgaggattctccagcctttagtcctttggtgcaatgttttcctttgtttttctgcctctcctttttctccttggagatcgcactcaagactcttgagacttcacatatcacagttgatcaaatgttatctctaggcctgaatagcagcctgggcattcaatctttggtaagtataaagtaggacaagtgacttgaaggtcactctgactctaaaattctgatatcttctgatgtttgagcttctttgtctgacttagtaaggtgcccgaagatagaaggcgtgtccacatgcatttcctcaattatcgactcatgtttcttctgttttatgactgcatttgacctgctggttgcgggcgtccctctttgtctcagtcttactcatcaaattaatcatgctgcttctggatacagtggctaaaccttgccctgttgaacctaatatcagggacagtgtgccgtgagatgggctttactacgttgctggacactttcacttggaaattaaattaacctgcctccgtatactttctatcccaaagctattttttctcctaagttccctaggaagtcctctcaccccccttctatgttttcagctcttacctatcctatcctgaactcttagcataagtccctgcttctggaagaatattcatctctctgtccatctgtgcattcagaaatgcattcattaattcattgactcaagatgtatttactgagtgttcactaagcattataggcattgaggatatcatgattgaagcagactggtttctactctcagagcttttgttggtggaatcaaaagacaaacaagcaatttcaatatggattgggatgttctaagtcagggaatagtaattttcccacacatcctgagtttctgccacttacattttcaaacctttgcctgttttaaagacaggattgataaagacacagtaaggtcaagacacacaagattgtaggctgaagaagtgcttccttggaaagacttcacaatagctcttatttatatgagtattggtataggcttatatagagaaaatatgggagatttctcagagatggactgtgttataaatagaacaaatcagtcaaattacagctttcaagccacaggcctcattagtctcatgagcagggccctttgtgggcaaactgaatgagccacgtggaataacactcgtgttcatgttttgcaagctcaacatgtcaaactgtagtgttaaaatgagttgctttacaaatgagctataaatattagttctgcatctccaagccattcaatatgcaattgtgaaaactgatatccttataacttatgtataagtcacatatataacttatacacatatacataacttcaatgtacgagtgagtaaaaagtacggcattagtcagtttgagttgctgtacaagatacccattcattaattcattgactcaagatgtatttactgagtgttcactaagcatcataggcattgaggatatcatgattgaggcagactggtttctactatcagagctttggttggtggaaacaaaagacaaacaagcactttcaatatggtttgggatgttctaagggaacatgtagaagcaacaggctaagattcagaaacatttctctccaaatgggaagttttctaacacaaacacccaacttaagaacaaagaggcaacctctcatccaaaaacatctgcccctcacattgctttcaatatgcaataccttaaaattccacaatgagtattttcccaaaacaaagaatagaccctccacaggaaaactcaagtctcttccttaggagactgggtgacttaaacaacagatgttcattttctcagttctgaaaactggaagtccaagatgaaaccagctttgccagccaggttggtgtctcgttggggcctcccttcctggctcttagagagccacctttccactgatcctcacgtggcctctctgggcattgggggtgcaggaagggaggcgagctttagagagctctggtgtctcttccgcttcttataaggacccctgtcctcttgtgttagagacaccgcatgatctcatttaacctgagtcacttccttaagggccctgtcttcaaatacagtcacaatacaggttagggctttaacatagtaatttttttacagctcagtccataacgacttacacatttcttattcctattgcattttctttcctaaagtacagtatttctctagatcagaagacccgactagacatttgtggcctggatttgctccttgtgttttatttagcccacacaataccttaaaaatacatgagccaatatttaacagctgggagaacattttccagcttctcttaaaatatgtggccatgctaggacccctttccccagtttaaacagtctgtgcattctcctaaggaagagacttgagttttcctgtggagggctctattctttgttttgggaaaatactcactgtggaatcttaagatattgcattttgaaagcaactctaggggcagatgtttttggatgagaggttgcctcttcgttcttgaggtaagttgggtgtttgtgttagaaaacttcccatttggagagaaatgtttctgaatcttggcctgttgcttctacattagctggctctggaagcatttgaggtatgacccatgatccaataggagttgctgtgatgatggaaatgttctctatttttacatggagctattgaatacttgaaatgttactgttgtgactgaggaagtgaatttataatttaatttaaacttttttattttggtaacctcatgtggctggatgctactgtattgagcaggacagttttataaaaatgcatagcattttgcatacaaaagggattcctagtcaaactggccacatgacccatcattgagctttattcgctcctggagtgatctaacagtggtaagagcttgtcctgaccaggaagacttggactcccaggtccccttgagagcccttgcacatatgagcaggatacctccctgtattttgtatactgaagatccatggttggggagccctgtgtgctgggagacactcccttagcaagtatagccgcttagtcatttgccaggctgttgcattgcatgcattcatggtctatagtagtctgtattaatgagaccccgaagagatggttggtacatagcctgcatggctgtacacagcaatccggattaattcatcagttatgcccggtgccaggcacggaagttagggaagtcaagggtgagatggtcatctagatgggtgactaaagcgaaagtacctgagccacggttgagagaagcacagtttgctctggaaaacccagcatggggcacccagacacatcagtgggaattggaaggtttcccctgagagacgatgtttaactgagacctaaaggttgagtaagaggcagtcagctgaggcattgggaagaggtcatcctggcaaaggggagcacaaggctggagtcagcaggtgcctctctgttcacagacttgcagctcacctgctactgtagatagaaacaaagccctgcttggcagagggtgcaaacagaactgtctatgaccagcctctggaagttcagggttccacataaacactgatggtccggtgttgccagcccccgtccctgaacacagcgatctgagggagctgatgggatgctgctctcaactggggcatcacctcatcctgctcaggtctcagcagttccaagctgtgtccctcactaggagaccatgcagtgggtgtcgatcaaaatgtttgcactcttgtctttcttatagtagagaaatcctttaatataaccaagtctctatcaaaaacagggaaatataagttagacaatgaaggaggagagtgtctctgactgccccatcaagttattgatgttacctatctgctcgggccctgaaggcattcgtttgggcagaggcacgtcctgtctgctccctacaaatagatggtgttcatctagagcagggatcttcacgtcaggcctcagtgactccaggggatattcagcagtggatggttctcagggaatccacatcctccatttccatgtgtactctttcctgggatggatccgcctgagaacacgcctggggtcttccctctcagctgtcctttcacgcttgcttttctccctccttgcaagggaaaggcattcctcccagcaaaccctcctcttccttgttgcattgctctggcctgtagaaccctttgctttccagacagaggagaatttcaaacattagggtcggtattgagaaagtggatggctttaataagtgggtaagaaatccccttgcgagccagagagcttagaattcttggttttcaagagaattgaaggtgaacccaatcaagttgtcagccaatagatcattaaaaataatgtttgatgataaatcactgagtgacgatgggcataacagaatgctgtcgaggaattgggtgaaattgttaaaactgttaaaactccttccttcccatctgtttatttatgaaaataagttttctccatgcatacatttataaaaacaaaaaaatagaaataaaattgatgctgaacactttttcaatttacctagaagtaatatccatccatgaatatatgaactaattaaaaaaagaacattcccatttatctcattgagatgtatttccagtaaattttacttttcttattcaataattatttgtcacaatgtataatgatgtgtgatggtttgattaattgtgaatagcaattatgatggataatcaaaccagtttttttaacatttagttttagagtcacaggaaattttaaaaattattgtaatatctgtctttttgctataaagaagtgtagtacagtgataaagctttcaagcttaatatatattacatcaaataaaactctgaattgaaggagaagaaggaatgatgtaaaatttgcagttgttaaaaaggagatttttaaatggtcattggtaggtatcaaatcaaagtggtctctgggtccctccgtatgatagaaaagagtgacctaaaattttacagtacactagaaattaaaacacttaaatgtaaacttaaaatatgtgagagggacatcgtttttcaaaatttttatggagtacctgggcaaaaatatctgaaggccatgttcagtgaaagtggtaataagaggcatatgcgtaattttaaaccaaaagttgaaacagagtgggaggagcggaagaggagggggagaagagaacatgttgggccaatatatttaacaataatcatcaagaaataggaaaagacaaaacaaaaatcttttaaatatctaacactgttttttctaatgctacatgcccatgaaaatcacctgggctgggtcaggactttgttttagtcctcaggtgattttaatacacagccagggttgtgaattatcggactaaactcacagagtggtccttgggctagtactatcagcatcatcctgggaacttgttagaaatgcagaatttggggctccatgtcagccctcctgaatcaaatcctgcatcttaacaagatatttaggtgattcatatgcacgttaaagttttaaaaaaccaagatttccaacaagctcccaggtgatgctgatactgcggttcacggacaactctggtcacggactacgctgggtagcagagttctcgagttgtgctactcagaaggtttatggcagagctactcgcagtatgatccgagaatcgcgagcctcgcctgacttggattcacattagacatgaaaagtcttaggacccatgccagacctagggatcgggacctctgggagtggggtccaggaatctgtgttttatcaagctctccctcactaaaatttgagaaggaccaccctagagagaatccacatcgacttcagatggctctgagcctccagttaatttagggagtggctggggatgtgttattaccaagaggccccacttcatgagagagctgctgcatgtgatgagctccctcatcacagcctcacttgtctccaatcccagggatgcccgttttgcagtgggtctcgaatgtgtgaccagttttacacaggagtgagctgacggtgccttgcctctttcctcgtaccacatgcatgtacagcccttgggcactgcacctacccatgtatcaggtgatccagaaggctgttagtgttgaggggggccgagacccagagagggctgtcaggtggatccaaggacaacttcgcagctgtttgcattgtttgatccagcagaacggatggtgctggaggcatcctttggataatgattctgtgtgagtcagtgcaagccccgttgcagagttgcagctcagggcccaggagttctggagcaaaaccatttgcttggcagcacagaactgcgtattatttgagaaggactaacatcttgcgctaatgagtttctgggccccagtagacactgagctccaggtggctagaaccagaactgcccaccttaggtcaagtattatcagattatttttttctctttttctttttttttttgagacggagttttgctctgtcacccaggctagagtgcagtggcgcaatctcggctcactgcaaccttcgcctcctgggttcaagcgattcttctcagcctcccaagtagctgggattataggtgcccgccaccatgcctggctaatttttgtattcttaatagagatggggtttcactatgttggtcaggctggtctcgaactcctgacctcaggtgatccacctacctcagcctcccaaagtgctggaattgcaagagtgagccactgcaccaggtgttatcagattctccaagtcataaggatggccagatgcaagaccgacccattgggtggtggaaataaagaagcaaattacatgacaggtggcctcagactactctgatgtcacccacctctttagtactgacacctctcctccacctccatggctgtagcctcaggggtaagggatccttttaaccagctggcaggaaactaaaaacttgggactaactcacagatgggtcagaatgacatgttggtggcagctaaaaatgtagttgttcaatactgtccttcccagggctggcctgaatcaccaggggtaatggaagtcccttcagtgggcagagatgtgagcagtacttgcaccaccatccccactggcccagttgtggagttatccttcctctccccagaccttaagctctgctgtgttagagtcctgcatcccgggagatgatgcctccactggagaatacccaagggtgccctggaccaacagtcaaagaagtcaccgtactggcctgggtactgggtcactgtgctggtatgggtagtggatcactgtattggcatgggtactgggtcactgtgctggcgtgggtactgggtcactgtactggcatgggtactaggtcgctgtactggcatggtgaattggtgccagtgaccacgaggtgcctgggttgctgctatacagtggagcagaagaaatctgtctggaacccaggtgactcgccaggtgtcccatggtgctcccacactggtatactgtcagtggacagttgtgacgaacaatcgtgagtccactaaacactttaagaagggtctggggtaccatgacaccagcaccctagaccagctaaaatgctggctaagagtgggagggttgtgctccttttctccctcacttcttcttcacgggaattccgcttcctgataatgctgaacccaggctagggcagagctatctgaatctgtagagcaaagagaagacagtgtctccacagagtcaagacatttactatgacatctgtggctccagcgttcaccacaatggtctctttaggaaaggattcccagaagaacatgtatcggccaaggagaagacggtggctcaacgcacattctcatttggcgaaagtgcattgaacaactgcctaacgcccgtcagtccgtctggacttaggaaaacccatgtgtaatgaagagcctgtggccgcttagcattagaggaatgtcagcggctcagggcagcacagctctttctcggggccctgatttatggaaccctgggctttgctgaactcacaggcatggacaccaatcttaagctgtagcatgaagcctcgtggtaactcaaaagggaaaacaagaaccactttcctcaactgtttgtaaacttatattagcttcagaattctgcataacgtagactcacatggctttgtctatgtgagtgggatttgaagccaagttgaatctcctggcttcggattctctattttgtaactgcagatgggatatgatttattaactttgtcgctagctatttgaaaaaggagctcttactatggagaagaaattgttacattcctatcacccgcaaaataggacttgactctttcttcctcaaattaactaaagtcaacctgttttcaattggtgatattccttcattagttttaattcatttttcagcacacctgattttttaattcattatgcttttgatggaaattaattagtttcttttagatctaaaacaatattattgtgggcactcagacattgttacacaaaagggccttattatgaagctggtctcagaatgaaagcctgggtctgtttcataggaaactcgcctgacgatgaagccatcgggacgctgaggctttttggctgcctggttctgagcctcagttttcccatctgtgaaatgaggagcttgagccagatgaactctaaacttttgtttgatgagcacaacaaaatgaaataaaatcttataaaatagatatatgaagatgtatatgaaggtttatggtaatattatgttgatcaaacattttcttagcccaatagagaatgaaaattaatatcctactacaactttgcagaaatcctatttatttatttattagacagagtctcaccgtgttgcccaggctggagtacagtggtgtgatctctactcactgcaacctccacctcccgggttcaagtgattctcctgcctcagcttctcaagtagctgggattacaggtgctcaccaccatgcccagctgatttttgtatttttagttgaggtggaatttcaccacgttggccagactggtcttgagctcctgacctcaggtgatctgcccacctcagcctcccaaaatgctgggattacaggccatgagccaccgcccctggcccagtttaataattttagaccgtattgccaattatttaaaggagaagggtgagtttgtatttctttaattaggtttaggtaacggcctagggaaaacgggaattgcttacacagacaggtgaggaggagagtactccatcagacccaccctaaattgaattaagactcaggacccttgatgtgctcagctggatgggccttggatgtgctagcctggctcccagggaactgtcgagctgggcacccacagtgttgctcatctgccccagatggacaactgcctgtaatttaatgtcttttccaacagggagctatgaaactgaattttactacaccaaagaaaaacccgcttccctaactataatttcaacaaggaagagtttacacagaaaaatcccatttaaaaagtgccacttaatgtaatacagacagcagctctccagcccgagtgccacacagagaacctcactgtttgcccaaggccttggagacagaagtcagacctgtgagcctctcgtgctgctgattcagcctgattaaacaagagccctaatttttatcaaatgtgcagtttggtattcacaatcctttatgagtagaacctcctgaattaatcaaacgactggttaccaaataaaatttttttcaagaaaagagcttatgacatcatactttattagctaggatgtatgtttcatcagaacatctgtcatcacacaagagacagagaatggactacctgaaaaatctacgcttaactacctggagcagagaggcaaagtgggtcagctgcccaaaggtgcagcttcggagagcggaggtcgcgagagccaggttggcggggagggatgctgggtggtgaggctgggccacttcagcctggagggtgagggcagagccaaaatcttaattgtaggttgttaaccaaacccattgaaagagaggccaggtgcggtggctcacaccttcccagcactttgagaagcccaggtgggtggatcacaaggtcaggagttcaagactagcctgaccagcatggggaaaccctgtctctactaaaaatacaaaacttagctgggcgtggtggtgcatgcctgtaatcccagctacttaggaggcagaggcaggagaatcgcttgaacccgggtggcagaggttgcagtgagccgagatcgcgccactgcactccagcctggtgacagagtgagactccgtctcaaaaaaaaaaaaaaaaaaaaaaaaggccctagagaaaagagcaagatgtggagtggccaggcctgaaatttgggtacgttaggcaggccagcgagactggaaaccaggtaacaaaagtgccctaaaagccactcttggctcagggtctcttcagcagtgggctccctttagcattcagagagaattctctccacgtgcttctccttttttttttttttaaacaaatgcagcctagtcaattaaaaagaaattccatttgcagtgtttatttaacactgaacaggttgcttgctgtatgaaaccaaaataataaaagtaaaataaaatttgagtgaataaattactggtacatttagaaagcggatgaattggcagcataaacagattgaaactgtggtttctagaataaattcagtagaaatgaaatttgatttgagctgctctgctacctacaactttgcagaaatcccatttaataattttagaccgtattcccaattatttgatgcagaagggtgagtttgtatttcttgataacacatatgtatttctgtttgaagtaaatgagagtaacttgcacataccagaaggaaagtgcgtcccaggaattttattaactatatgtttaggttgctgagaaatgacattctctcttaatttcatgaactgagtagtaaaagagctcactggggatgtgtgcccaacacatgcatgtacacacacacacaggcaaggaaaaatgtgctggcatatccttttgggtatgcagttaatatactgtttaaagggatctcaataaagatttcctataaattatgtttattgcatgaaaataagtagagtctaaggtgtgcattctaaatgtgcttggggaattccagcctttgattttaaaaggagaaggacatttgtttaaggaatttgattatctactgataggtcatttctgaaaagaatatggcacattcatcttggatcccagtggaggctttactgcggactgccttccccaaggccctgctccctgcacacctcactctcaacagcctcctggttctttgcgaaaaggaagccatccaccactctataaatcctctctaaacatatgtatgtggactcattcttatttacctccctcctgtcctaaagagtattactgcttccgttgaaggctaaaatttcccccacttctctgaactcatcttttccacaagcttggctctgttcttgcctttatctggaaccctgtgagcacactcagcacatttcctagacagccgtgtctttacccctggttcctatcaggagatccccttctcctcccgctacgaggggcagcagcagccctctcccctctccacgaccctctttagtctggctgctgcttgtcaggtccgcactggaactgcccccagcaggtgaaaggtgacctgtccatctccacctgtagaggtctatgttggtcctcatcaccttggccctactgcgcggctggctgtccccagtgccaccccagtgttctcaggttttctagtctctgacagctgccgcttagtgtaatcacgcttctttttttttttgctttcccattaagcattgttcttgtggagagctgcaatgcctccagctcttctctgttcatgcctctcacgtacacctgaaacctccaaaccctgcctttgcgatttcaacctttactcctggaactcacatgtgtgccctgctgtctagatgccccatggactcctcgatgtaccatcgacttcatcaagttcattatttcttgcccagaccagttcctctgtcactatcgacttggtcgccataaacctagaaatcctgggatggtcttaaattctttccttcttccattaaatggccagattttcctgattctatttctaaaaataattgtaatttatttagtatttaccgaggcctttaacaagctatgctgaggcagctgtctgacagaggagactccttatggccatggccacaagagtagtaagtgacagaaggaggattggaagcaagcgtgtgggattgcaaagccggccttcctcctcttgcctgcttctcacgctggtctttgttgacgctgtcatgctctcattatctctcactggattaatgctctcagatgtttttgctactgtttatcctaaaggaatttttgaaagccgtgtgtccccttgcacattttaaaaaggatattaaattcattttgtacctgcaaatagttgcaaggaatatttactgtaagtaatcacattttaaaacaaaaccatgacatcattcttctgaatggagcaactagaatatcccttagatgacaccattttctatttcaaaagtatgtggaaaacattttctttgacagttggaggtggtgctgatacactattgcactccgctgcacccctcccagaattagaccctaatataatgttcttttatgcttgaaaaacagttattaatcatactatcgtactttcctgcaacatacgtatcacatctacccatacacacatgtgcatatgtgcacaagcacatacacatacaaaccgtatttgaaatgtgcttatttccagtgaccataaacttaaaaaacaaattccatctcgagctgttatgatgatagttcttatgacacagttgatcaggattctataatatattacaaacttcataaataattattaaacctataaaatgttaattggaaacgcatctcttaacgagatggattcaggggcatttatgttttggggtcctgatgaaaggaattccagttgttcctttgttttggtacccagaaggatgttattttaaaaatcccttatcggaactctccaagcatcttcagcacttttcctgacagtcctgtcttccttacgtccttcagatgcaggatgacaggagccttctcttgttaaagtaggaggagggtgatcgtgaaagggaagttgagagggagtagctggagtcaggcaggcttcttgagcaggcagctttcagaaggaggacgcatggaaggtggatatctactaatagaagttgattcccttaaaactgcctgtgtttgaaaagttcatagagtacacacttagccccaggggaacagggaacatagaagaccaccacccaggccacgttctgcaatgactatagagttgtcttttcttttttttttttctgagacagtgtattgctcttgtcactcaggctggagtgcagtggcgcgatcacggctcactgcaacctccgcctcccgagttcaagcaattctcctgcctcagcttcccgagtagctgggattacaggcgtgcgtcaccatgcctagcaaatttttgtatttttagtagagacagggtttcgccatgttgaccaggctggtctcgaactcctgaccttatgatccgcccacctcggcctcccaaagtgccgggattacaggcgtgagccgccgcgcccggcctggagttttcttttctaaatatgccacttctcttcttccggacccccttgaggcccagcgcatcagatcttcacttcctggcctggtatttaagacttttcatacccgtcctttctctgtttagagtttccatttgccgtccgaactttccctttcaaaggtttccttttctctccaaatgaatgcacccctcctctgctggactgttcttgaacaaatcccctggcctggaatgcgcttgtactacatgtcttcaggatgctccagcatcatgtcttccccggagatgcacccactcctggctcattcactctttatcttcaccactcagcgttgctgctcctgccctgcctgctgaggtctgagctcctttcctggcaacactcccctttcgaccttgtatccttgagtagtgcaaagcccaggacacagagtttagaatggaatttgtatagtttctaatggcaagaaattagacttcctggacatttgtgggaacatggatttattagtctttaggaaggtaatttttaaggaaaatttgtttaaccacttcagtatatgttcaatggttgagagggtaatttttgacttcagagaatattacaaggaaataccatgaatttggaagatcctgtgagccttattctgactagtgaatttcaatttagagcaggccagagaattcattttgatggatgattcttagagggcggcgtattttgataatagattggaatgttgctgatagctggccattgcctgtgttacaacaagtagtcttttagttagcaggatcatttgtttattttcttgttactgtacctatctgtgtaacttaggtctttcttaaaaaagctgttccaaagctcacgtggagagtttgtgatagaagagttgacagacctttagttatgaaggcagtgcttggcctcacaataaaatattagcttggctggagagagaattcagaagtttggaagaataatatgtattttcataagtcgaaatgaccaatcattcacaagttgagaaaggacttaaggctcagtagagtttcttggagttatgtaacatcagtcaaaacttggaggatgtaggcttctatacttacaaggtattttcttccacattgctgtcctgtgacaaaagccaggtaggagaatgaagagcacctgccctgggaatggacccaccccccttcgagtctggccctgccactcatcaggcacatggctttggcaagctaagaagccttcttctctgcatccaatcctcatctgtcaaaggggacagcaatgctatgtatctcatgagaacatttaaagtactaagtaaatatatggaaagcatgtgtaacgttgcttggcatggagtaaggggtgacttattttactcttttctggaatgaaaataagatgccttttacactgttggtgggactgtaaactagttcagccattgtggaagacaatgcggcgatccctcaaggatctagaactagaaataccatttgacctagctatcccattactgggtatatacccaaatgattataaatcatgctgctataaagacacatgcacacgtatgtttattgcagcactattcacaatagcaaagacttggaaccaacccaaatgtccatcagtgatagactgcattaagaaaatgtggcacatatacaccatggaatactatgcggccataaaaaaggatgcgttcatgtcttttgtagggacatggatgaagctggaaaccatcattctcagcaaactatcgcaagaacaaaaaaaccaaacaccgcatgttctcactcataggtgggaattgaacaatgagaacacttggacacaggaaggggaacatcacacaccggggcctgttgtggggtagggggaggggggagggaaagaattaagagatatacctaatgtaaatgacgacttaataggtgcagaacaccaacatggcacatgtatacatatgtaacaaacctgcacgttgtgcaagtgtaccctagaacttaaagtataacaaaaaaaaaagaagacaccttttattatttctaagcatcctctgagttcttgaccaaacctgatggtgcaactaaataaaccccgtgcatgcatgattagtaattcaaaattataccctacgtgttggcattttcacttgttggagtgaaaattatcattttattaaaattcacttaaagcttgttgaaagcaggcagagatgctatctgccccaaataataagcttttagagacaatgtctttcttgaagacatgatatagtcttttttaattgaattatttggcgttattaacattttaatgaaggaattattctattttcatatttcttagaaactaatatttaatttcctttttatgttaataatataagtatttagcatatttaaaatctcagttaaaactaatttatacttatattttcataaagatagaagcgtaatatgcttctttgcattgcgtgtttatgttcttgctttgtccaagttttcccttttccttagctatattttgaaaataccagtctcaagggaataataattgagatcagtaatatcttggatgaaaaagcttgccaatcatgccggtgttatgaggatgtgtatttttaagaggagacttactaagtaagattcactggcattgggcggcttgatatatgtgatttatgggaacacctttcagtaattttacacagtccaccagaaaaccttcctcataggtagaaatgaggttgaacccagaagaaacggcctttggaaaagaattggacattgaagctaagcggctaaatagcttcagacatccctagaggaagaaaaataagatttaaagtgttattattaaagaatatgatctataaataaaatggtatattctcatacccctgacagattttgacaaataagagaaaaatgtgtgcttaataggaaaaatgtgtttgaagtatgttttacactatttaatgccgctggtgcactgagaggttgctggtggacttgatgttgagttaatcttggtgaacaaatagagaaggaaggattgcttggcgctggaggtctgctttgtgcagagcagctttgttgacagtcaaattagaggaccggcctcagtgccagttctcagcacctcgcggataatgagctttggacgagagtgtgggtctaggcttttttttttttttaacttgagattctttaaatcattttgaaattttgattttaaaaatagttctggctaatattccgtagaagtatagaaaactggccagccgagagcgacggatggcaccaggcctttgaagggtagcttgtgtgtttggaagatatgtgctgcattgctgtgggtaccgtgctgtcactagccatcaccactgccaacacatcagtttcacgagtcttgcaaaaaatgagatttaaaagtttatttaaatctcatttatttaaaagtttttttttggccgggcacggtggctcacacctgtaatcccagcactttgggaggccgaggcgggcggatcacgaggtcaggagattgagaccatcctggctaacacggtgaaaccccgtctctactaaaaaatacaaaaaaaaattagccgggcttggtggcgggcacctgtagtcccagctactcgggaggctgaggcaggagaatggcgggaacccgggaggcagaggttgcagtgagccgagatcgcgccactgcactccagcctgggagacagagcaagactccgtctcaaaaaaaaaaaaaaaaaaaaaaaaaatttttttccttgaaatttgcttttaaaaacatgccatttcaggaaagaaaaatatgtttctttattctttaaattcttaaattccatgtacttttgccataatagtcacccacccccagagtttttctgagagaatcatctcatatgggtgcagaatgttaccttatggtcaaactaattagctctgttttcctacctgaccgtgtggataagggagcatttgtcatttggatgatgctcagtgtatatagtcatccctccattccaggacccctgcatgaaccaaaacccacacgtgggaaaagttagttctccacgtacgcaggcttcacatcctgtgaatactgtattttcaatccacacttggttgaaaaaaaaaaatgtgcatagaaatggacccatattgtttaagggtcatctgtacattgactttccattgcaaagatggaaagtaacctattgctcagcctcgacttggacatggtttgtagtcctaagtggattctggagttcatttagtaaacaattttggagggcatctattaagtaccagctgctggcaatatagccataaacataactgtcctcaaggatgtcacaatccaatctggcctgtgttttaaaattattgtgtgtgtgtgtgtatgtgtttaatcaagtgattttaatattaaaaactctgttagaaaattttataattaaattttatatatatgcatttgtatgcattaaaataagagttgtatatcccttattcaaaattcttgggaccagaagtgtttccagtctcagatttttttggattttggaatatttgcagaatacataccagttgagcacccctaatctggaaatccaaaatcccaaatctgagatgccccagtgagctttcctttgagcatcacgttggtgctcaaaaagctttggattttggtctggcacagtggctcaggtctgtaatcccagcactctgggaggctgaggtgggcaattcacgaggtcaagacattgagaccatcctggccaacatggtgaaacctcctctctactaaaaatacaaaaattagctaggcttggtggcgcacccctgtagtcccagctactcgagaagctgaggcaggagaattgcttgaactcgagaggcaaatgttggagtgagccgagattgcaccactgcactccagcctgtcaacagagcaagactccgtctcaaaaaaaaaattttttttggatttcagagcattttttgatttttagattagggatgctcaacctgtatttttttaaaatgctttacacatttttaaatttgagagtatggaataggggttataacttctagagacaggatacttgagaaggatattatagatcttactttcttagaaaacttttaggagccaaaggttatgtacggtgtggtagaggaaccatagaggttttgaaatcatctgacttcagttcatatctcaactctgttccttcctagttttgtgactgagagaagactacctaagctctgcagaccttagatgccttatctgaaaatataaataattaatgtaacaatacataccttatagagtatgtgtgcagattaaatcagataatgtaactcctgcaacacagtagatgcttgctaaatgttaatgattgccccctgtctcatttccttacctgaaatctcaatactaattactggtgtttgttgttgagtgctaaaggtgatctgattagtatagggtcacagagcaaccatattccgtaatgccaacacgaagatctttcaatgagaatgaaatgcaatttttatatttttattcatgaaattttagagtcacataactacacttgaatgcctttgttcatgagaaaacatagaagtgacaatttagtatttctctgcaatatcttctgtaaacattgaaagaatatttgagggattttcgatcagatgtcagactgaagtaccttctgcagccactccttctcactccaaataatagaaacaacaaaaaagataggtacatagataacagaaaagatgggaagggatgtattatgaggaatcgctatagagaacagacaaagttggattgaaaagaaacctacaaaagatgggacgaacactagagttaggagacactgagagcagggtggacccaggtgcacatgcagggtggctcagtgaactctaactgcttcatctacagtgtcctccagaccctgtacgtcctaatccagccctgctgtggccacagatttgcctgcccacttgtgacagctatcagtatcaggacttaggcctaagagagaggtcacttttctagtgagctgggaggacagaagagcccttcactcccagaagatgatctagataagatcctcaagagcacatccaggtccttctctcactgcaggggatagacacagcagatattcttacctggaatctcaaatagaaagatgagcaccacaccaagaatcactagacagctggggaatgacaacaccatgaaagagagacacccactcaacaaaaaatacttatgcaaggaaatgctgaatagaacaagcagaagagaactacagaaaaggtacatttactattttaggagaggtgcaagaacatattgcatccattagaaatggatgaacctgtaaattaaacattgattgttgcaataaaaattaaacaggctgaagacaaaagtgaattcaacttgagaacaagcttagaaattctcctaggatgtatcaacagaagactaggagaaataatgtatgtaaaaaaaagttaatggacatagaagatagagccagcagtgccaatattcatcaaatgacaggagtttcataataagggaatgtgggggaggtaatgtacaaagaagccctaggcaattttccatagctgcagaaaggcaaagaggccattaggtgccaataaaagagaaacaaacaaaaaacttacaacacaatatactaaaagatcctggggtggatgtggaggctcttttagtcaaagttctgaggggaaaacttaagaatgtggaaatctgtgctgcctttcaagggtcaaaatgaagtgaagactataagactttttcagacattcacagtctctaaagcttcaattaatgaatggtgaaagaattaataaatgatgtactccagcagtaaaaaagctgcataaaaatgaataataaagaatttactgaaacttactgttaaatctaaatgtttattattgatagcattaatacagaactaacattccaagagttatcaaccagagattttggaagactggggagaagagagatgtggagtaagggaggaataaagaaaatgcatactaattttcttatcttgctcaagggaaggatatgcttattgattcagtctagatacaaggaaaaagtaagtttctgtaaatgttaaaaatttaagggtagctagtagaagaatagaaactgaattcatgacttccaaactactggagaaaaaaataatgtaaatctgatcaagaaaatatatgaaaagagggtttaaaaaatgaaacaacctagaattttggcaaaataagtgcataaaatatcaggtagttcaaatagattaataatctcagtaaatgtgactaattttgactaacaagactaacttcaacccaactctaaaggacagagcctttcaggtaatgttaaaaaaaaaaaaaaaaaaaaagcagctggccgggcatggtggctcacgcttgcaatcccagtactttgggaggccgaggcaggtggatcacctgagatcaggagttcaagaccagcctggccaacatggtgaaaccccatgtctcctaaaagtacaaaaattagccaggcatggtggcgggcacctgtaatcccagctagtcaggaggctgaggcaggagtgtcgcttgaacatgggaggcggagattgcagtgagccgagatcacaccactgcactctagcctgggcaacaagagcgaaactccacctcgaaaaacagctatgttatatgctacttataggatataaattttttaattgcatagtatgaaaacatgtcaaacattaaccatgttgattaggttgagcaacattaatataagaaaacttagaattcaaggtaaacagtgttaaaagggacaaagagggatatttcctgctgaaaaggaaggctctaccaagaaattacaaggcataatcagtataccataaccaagtagattgaatccccgaaaatgtaaggatggttcagaattacactatgaaaaaatcaactcctattaactgaaaaaaattactcttagtcacctgggtatagagggaaaacttatctaaatagaggaaatctaacaaaaatctactggaaacaacatactgataaattattagaagcattaagtttgaagtctgaatctggggaaagatgtctactattaacattgtactcaggacacagtcagtgcagcaggacaaaatggaaggggaaggaggaggagaaaggggaaaaagaaactgaaaagaaaaaggtatagatattagaaaaagagcaaactgtcattatttcaggcaatatgattacttgcgtagaaaacctaagacaggctgggtgtgacggctcacacctgtaatcccagcactttgggaggacatggcagggggattgtttgtgcccaggagttcaagaccagccttggcaacatggtgagaccccatttctacaaaaaataataaaagaaattaaccacgtgtggtggtgcatgcctgtagttccagcttcttgagaggttgaggtgggaggattgcttgaggccagaaggtcaaggctgcagtgatctatgatggcaccactgcactccagcctggccgacagagtaagaccctgtctcaaaaaaaaaaaatgaaagaaaacctaagataataaactgaatattaggattaatgagagttctgaagggtggctagatagaagatagatatggaaaaattctttttcctgttcatcaggaataagagaaatttaatagaaatacagtaaaataggaacataccattcactgtagcaagcaaagctattaaatatttttgaataaactgatcaagaaatagttaagaatctatagaactttaatgacgatttttaaaaggaacaaatagtgtgatataccatatacatggatggaaagactcaattatgtaaagttgtcacctctccccaaatctataaattcggtaaatcatgaaacttgtcaagatgattctgaagttaatatggaagccttaataatgaatggtttaaaccatagtatattcatgctatggaatacaatggattagttaaggataatgaggtaaatttgtacatatgagaatggctacacctccaagatacgtttttgtgtggtgaaaagagaaaattgctaaacagtacatataatatgatatcatttttttaaaaaaacacaaaagataagtcaggcaccgtggcacatgcctgtaatcccagctactcaggaggctaagagcgggaggattgctgagcccaggagttcaaaaccaccctgggccacatagtgagaccccatctcaaaaaaacaaaactgcaaaacaatactttatatattttattactacatgtatatacatctaagtgaattcaaaaaatacccaggaaaaaaaaatcacaagaagcttaacttcctttctggaaaggaaggatgaagactgaatgtagaaaaattttcaaaagggtatttgacccacctttccaagtcgtctatgtctgctttgtgtataagacccagggttttttgttgttgtgtagcagggggaatagggaatggtatatctgtaccatccttctaggaagcacaagtcccagtacaagctttaaaagtaagcaaaaaacgaaggaagaatttccctatcaggtgtcaaagtgtattgcaaacatcaactaataaatttgtgatactagaataagaatgagcaatagtgttgtttttggttatctagtataacagttgtcccaaaatttagttgtctaaaaccttgtatttttcttttttcttttttttttttttgagatagagtctcactctgtcacccaggctggagtgcagtggcgtgatctcggctcgctgcaagctccacccaccaggtccacggcattctcctgcctcagcctcccgagtagctgggaccacaggcgcccgccaccatgcccggctaattttttgtatttttagtagagacggggtttcactgtgttagccaggatggtctcgaactcctgacctcgtgatccgcccgcctcggcctcccaaagtgctgggattacaggcgtgagccaccaagcccggcccatatttttcttttgctcaagattttgtgggtcatgaattggaaaagggctcggcaggtgatggttgggggctcaactttgatccacctgcctagctgggaggctgggctggaggtctccttccaaggtagctcctcctggggggcctttgctcatggcttgaggctgtcattgcatgatggcatcagggtagttgcagttcttccatagtgaaatccacttatcaggcactttgaacttcagtaacagaaaacctcaactcacgctggttttggtttttttttcagtaaggtaattaaaagcaggctgtaggtgcccactgtggctcatgatgttgtaaagacctgagttttttctgtctttctgctctaccattctcagcattggcttcatcccaaaccaagatggcagctggcagcagtttggacatggtgcatcctgttacattatcaacagacaaagaaagtcaccccataaaaattccttctcttttgtcttataaggccaacttccattaccatccccaggggacagccagatgctcattggctgaaagtgattttcaggggttaagtcaacactgagttaccacactgcccaccacacctgtgtcactcacgtcacacttctccagatccattgcaaataggtgaaacatatacatgcaaaatacaaaactgtacatccttagaaaataatgacgtgtggggaagatcttttttaagaaacaaagttttaaagcaacaaaagaactgatagaaattttttttttttttgagacggagtcttactctgtcgcccaggctagagtgcagtggcatgatcttggctcactgcaagctccacctcccaggttcacgccattctcctgcctcagcctcccgagtagctgggactacaggtgcctgccaccactcctggctaagttttttgtatttttagtagggtcggggtttcaccaagttagccaggatggtctcactctcctgacctcgtgatccgcctgcctcagcctcccagagtgatagaaatattttattgcatcaaaatttaaaacctctatgtaacaaaggccctataacaaaattgagacaaaagacagactggaagaaaacatttgcaacatagtcaatctacaaagtctttttagaggtaatcactcgaaaaaagacaatgaaaaaaagatgggcaaaggatttgacaagaaggttgataggtgatgaatacatattgccagtaaatgcatgaaaagatggtcaagttgacttttcatctaggaaatccaaattaaggcaaactataaattttcactcaagttgtcaaacatttaagaagtttgataatatcaagtgttgagcagggtaaaaggataatggaattttcaaaatgcaattgatgtgtaaattaatacagccatttttgggagcaatttggtgatatctattgagaaaataacttttatttgagggatgtgagtccttttaaattatcaggcccagagagacattaaaatgacgtagcagtcatctcctcctctccccttggaggcctgtattcatctcttgaaactgctattttttgccacaagtagctataaattaacttgataatgccgcacctgacactgtaacccacaccctatagtttaacaatatgcagccaatcactaatcaatgtgattcctgtaaaccaatgagaattgctgaccaaaaaaacttgatcagcccactccctgtcccccactttttgcctttaaaaacctgcttgcaacaaaggccgaatgaagctcacatccaaggttaccggggtctcagtcttctgggcagctgtccccactttggctcaagtaaactgtctatattttgtgcctcagccacttccttttaggccgacacgattataatgatgaatgtccaagctctgtaacccttcagtctactgctgtgaaaaatagttgcacatgatcacagggagacacgcgtaagggtgtttgtcctcgtgtcaactggaaacagttgtaatgttcctgagaaggatgattaaagagcctattatgtagctaggatgcaatattatatgcaaaggtcagtgaagcgccgtgcaaaaagatcaggaaagacattgctgtcattttactctccactagttatttaagtcatctatgtatttgtttaagcaaaattcgcttgtagttccattcggtatctttaaagttgaagcatcttcttgcttgattgttttggtgcttgtaggagggtagtaatcactgtgcaggcatttttgggcttggggagtgcttgtgtgcttcaaactgaacagtttccactgaccccctgctgcttgggtgccaccaaaaataaatggaatgagtaatttgaacacaaatgggagaaagcacgactcatttccatactatggagaacttgaatgtcttcaccagaagggatgtctgttaacttggtgctcattcaaaaccttatttggggctaacacttctttataagctgtcttcatgagcctgaagtaattcaccaagattgatttgtaaaacattctgaatcaattaaggctttaatcagcaaagtagcaaacttcacatggcttgtggactaattttaccctctcccgtcaatgtgaacctaagttgaaaaaagaaaacaattaagaggatgtaattatctgtcctgattactgaattaaaagagtttgtgtttatctgtcccagtgtaaaggtggtaaacaatgccaggagctgtggcactccggagctcctacacaaaaacctgcagagcatcctagaagactctagtgaccctgccttaagtgacctggcagcaaacaaaggctgccgagtattattgtgtataaatgtttcccagagcacggtttgaaaaagctccttgccaatggtgggtgggggagtttcctgcagaaacatctcatttgaattactacatggacagatccatctacttacgcaatgcttaggaaattgctttcctttatttagaccagttctcagcagtggctgcatatttgaaccacatggcggagctttggaaagtcccagaaaacactcagaccaattacatcagaatgtctgggggaggaagcagggcgctagtaccttttcaagttccccaggtaatttctgtctgcagccaggattgacagatccctggttcagacagcatttccaggctggtgcagtctcggtctgtgttgttgtggcacagcgagcaaatcttgtgggaatagaatgatttttgacaatgtcttctttttggtaaagggtatgtgttaatgcataacataactaggataacttttgtaactttgtcagactttaatgtttatgcatcagaaagattcctttctcagataatgcttcctaattcctgagttggaaaaagtggttatctgaattatttgttaggcaaagcttgaatagtcagtgactttcacttagtctcttccttattttcacttcaaatgtcaggctttttaatacgtcaggctttttctgaaaaaaatttgagcttgagttactagtggtttatttgggacctctcttagttccatacttcagtgttccttagagcagccgtccccaacctttttggtaccagggagcagttttgtggaagacataaaacatttttcatggtgggtagggatggtttcagggtgttcaggcattagattctcataaggagcatgcaacccatatggatccctggcatgcacagttcacaatagggtttgtgctcctatgggaatccagtgccaccgctggctgatctgacaggagggggagctcaggcggtaatgctcactcaccagcagctcgcctcctgctgtgcatcccagttcctaagaggcctggaacccataccagtctgcggcctggagggtggggacccctgccttagaggatgagcagaggactgctggtgcaaaccctcagcctggttcctgtcctcctgagccattcacttctgttccaggctggattatctacttagcaagatgacccagactccttaaaggaacacagggaatgaatagtgttagccctgcttgcctcctgggttccttacctctcccaccaattgaattatcagagacctttccagtgagggaaattctgcctgaaacttttctccacttgtcagcatttccactgatgccttactgcccttttgagattggcaccccattgcctggctggcccattttattttaactgtggcaaaatatatatattgcataaatgttaccattttaactatgtttgcatgtacaacttcatgttattaagcacattcatattgttgcaccaccattaccaccatccatttccagaacttttccatcgtgccaaacagaaacgctgcactcattacaccataactcttcatcatcctccctcttcagcatcctcactctctctataacttttgttctactttctgtctctgaatgttcctactctgtgaaggtcatagaagcagaatgatacagtatgagtccttttatgactggcttctttcactcagtgcaatgtcttcagggttcatccatgttgtagcagttgtcagaattccttccctgttaaggctgaagaatattccatcgtacggatggaccccattggtttatccacttattccctgacgggcgcttgggttgtttctgccttttggctgttgtgaatctgctgctatgaacatgggtatacagatacttgttcgagtctgcttacagtttctttgggtatatacctgggagtggaattgctgggttgcatggtaagtcgatgtttagctttttggggacacatcatactgttttccacaatgatcacagtggtcacattcccatccacagtgcacacaggttccaattttttcatatccttgccagcacttaatttctgttttttgtttttgtttttgttttcataataaacattctacttagtacaaagaagtaggctggtctatttttcattcactgtgcctggaactggctcacttctaatatgtttacacatagaagaaaaattgtgtttatgtcaatttgggcagggatcaagtttacttctcttctccttacgtttcctattctgttctctttgtttttatagtcaatcatttttacatatcttttgctgtcattttaatggggctttgggagggaaagaaggtcgatatatgttgatagttgttgtgggcagagattcagtaaactgtcccttccctttcctgcctgacgtctccatctgttgaagaataagacaaaagggtaaagcagataggaagttaaaatattgtctttataactaatacacggatattagagatgtggctaatatctctgcaagaaagtaggtttccagacaacaaaaccagagctgaacttggccacccagtcttagacagccccaaggacgtgaggggcacagctgaccttggccgtccagtctcagacagccctggggatgtgaggggcagagttggtgtgcctcctgatctagcctgcttagtaacgggaaagaggaaggagccccagggaatacaccctgtttattgctcccaaattcaccaattagctcagtcacacttctttccccagtgagggaaagaatgagggagcagagaaagagggaatgacaatagtggatcactaataccagtagtgacgatagtgcattctctccacaaagaagaaaacagatgtgagtaagaagcattttcccccagcacaaatcctccatgtttaacagactgtcccatttgagcttgctctctgaccactggtctctcaggggtgctaactctgagcacatttcctatacgtttcttcagtctcctaccactcagacgtcttggctgtggcatgaggtccccgtgccctccagcacgttttactgacaggagtagaaaggaagggcatgtcatacccccatcttgggaagtgatgaacgtccacagagatgagattcataggaagccccatctgagccacagcagatggggcaggagggcccagggggctggaggttgtggaagcagggagtgtgggaggcctggtgatcctcctgaagaagtgagaatgggttggcctaaagggtgagttggtgggagaaaggagagaatgcagaagggcatttcatcccactccctttggagggatgtgggaatgtggagaggagtaagaccgacagactcaaaatgttttgacatgtgacacgccatttacaaatatgtatgctttgtaggcagaaatgaaagaatagccaccagatagaaaccaggtgtctattttccctgagttcttttattttgttttattttattttggagacaaggtctcgctctgtcgcccaggttggagtgcagtggtgtaatcacagctcaccgcagcttcaaactcctgggctcaagtgatcctcccacctcagcccctcaagtaactgggactacaggtgtgtaccaccacgtctggcttatttttttcttttttttttttttagaaatgaggtctcactgtgttgcccaggctggtctgaaactcctggcctcaagcctcccaaaacgctgggattacaggcatgagccactatgtctggcttcacctccattcttaacccatcagttttatggatttttcttctaaataacccaagatcactagcaccaacatcttttcagaagttattttgggctccacagggaaaagaagccctcgtagtcctacataaacacacttaaagtgtgtatttgaaaagcagagagagcagcagcggacctgctggtacacagatcagaaaggagatggggatgcgaaggatgagatgggattgaaaggaaaaggaggcagagtgacagaatacagaataaaacattatgaatatattttgttagttgactttttagctattttagaatacatgcataaagtcctttcagttcttgggaggctgaattctctcattcacaaccaccatattgagccttactttggtctcagatcacactgaagagctgattcacttatgcattcattacttcaataaatactgattgtgcatctctcactggagaggccccattccaggctcagggaattctaggacaaggagaacaaagatgaccctgctcttctgagctctgattccagtggggaaaggcaacaagcaagtcaacaagcacataactgtgatcattccagagagtgatctgtgctttgaacgatgaaagggggccaagtgattctctcagcagagagaacaagtacacaggccttaggaaggcgggacttttttgtgtgtagggaaagaaggccagaatagctgggttacagctcccaaggggagggcaggatgagatgatgaattttgaggagaggctctccagaacagtgcatgcacgcactagttttcatgcaattccacggaggtcgtggactcccctgcccctgcccataatccatggaccacagattaattgaaaagagagactgagcattgattgtgaggcatacagacaccaggctggttagagtggggaagtgtactgttcccagggcacaggaatggcatgctgtgtttagggatactggctgtggaggaaccacttgagaggaggcgtaaggacagactgtgaaggactttgatgtccaggctgaagagtttgaccttgaacccattagccatgggagctggactgccgagagaacacgtggcctccatccacagccctcagctcagtctccttggtaggccttaggctggtgaaatgcaccagctctgccatcctctgtccttctggcaggttaacaacaaagtggctcacatgtggaaataaacgtggctggtatgagtgggcgcaggccttcattccccgtgctaatggaaaagccgtatttttccaagtggtgctgtaaaagctaagaaaaattaagcttcaatcaaacacagaaaaagcttgattttaagttagattgaagtgaaattaaaattgaccttggccagttttgttctgaagagatgagttcaaactggccaaagaaaaaaataggcccctaacacaggagagagaaagagtggactcttcattgaaagcatgtttttctcaagcatgtgaagaaactagaatttgattattttggtgtgaaggtatataaaaatgcagcccttttgattaagccatttttaaaaacctaatgtattagtccattttcacgctgctgataaagacatacccgagactgggaagaaaaagaggtttaatggactcacagtgtcatatggctggggcggcctcacaatcatggtggaaggcaaggaggggccagtcacttcttacatgggtggctgcaggcaaagagagagagcttgtgcaggggagcttctctttataaaaccatcagatctcgtgagacttactcactatcacaacagcagcatgagaaagacctgcttccatgattcggttacctcccaccaggtccctcccacaatacatgggaattcaagatgagatttgggtggggacaaagccaaagcacatcacttaaaatatggtttttgatatctggcttattttctggctttggggtagtgtgcttgtttcttaaatcagaattttctttagaaataactatgttttatttcttcgctatcattccttgactatgcatggatctctgctgcatgaacatgttctttttttttcatggaagaaataaatatcatttctggcagaccatgacttatcctttctatctttctcgagatgatcagactccacagattgtgtaaaacttctcggaaaaaccctatttcataactcgagagtcatttttgtttgaatgtttcacggaatgttaatcctggcatatttggctgccatcatgaaggactgcagctgtgtggcgtggaaagttcaaaagaaatgacccaaaggaatgagtcataggtcagccttacaaattgggaagaaatataatcaggtaacctgtcatcacccactagaagtgttattatttattgtttattggtaaaaaataaacctgtcaccaatcattgattctgaaaaatgtgccgcttagtttattccaatgattggtacatgagctgggaggatttgtctcagggaagcactgtagttattaaataccatcaagcggacccttgatataatgaggttaaaactgtctgtgtggaggaactatactttattaaagaaggaataggaaaagaaagccaccttatcaaagtcagctttacagactaggtgacaactggttaatgaatttgctattttagttgaaaacataatttgcattactgttagacaaaatagatggggggcctttacaatcagataatgtaatctgctctagtattatggtccaaccctgttctttcatctataattttctcccacaataatgtattactattttaatactgcattctgccctgataaagtctagacttgcatcccaattccaaacgtcagcataaatgtacatatgcaccttttattgtgtgtcttcataaaccaagggcacttccaggggtacatctgttacctttaatttgcacacataggtccctgttcatgggctgctgtttataaaaaggggtttcattggcatcatttcagccttcagagtgagaaacattgaccctgcttgcttttgttacctaatattctgagctgaataaatgatgtgtacagtatcattgctccgtatgagaaaatgtaaatgactacattacattgttggaaggcagtaatacaaaagggaaatatgaagtcagccgacatttctcattcgggaaaaacaaagctgattctggtgattctgtgtgggagattgtactgggctgcaaagcgttgtcaattgaagatttttttttcccccaaaaaagaggaaactaacagtgtgctttttggcacagttgtatttttcatttcttttttttttttttttttttgaggcagggtctcactctgtcgcccaggctggagtgcagtgatgcaatctcggcccactgcaatctccacctcccgggttcaagcgattctcctgcctcagccttccgggtagatgggattacaggcgtccatcaccaggcccagctaatttttgtatttttagtggagacggggtttcaccatgttagccaggctggtctcaaactcctggcctcaggtgatctgcctgcctcggcctcccaaagtgctgggattacaggtgtgagccaccacgcctggcctgtatttttcattcctctaagatttcagtcaggtgtgcaagcccagagggaagcaggatagctgggcttcggggtcagctccaggcttcctgcagcggccaccctgtgcccccagcccgctgcgtcctcttcccagcagctcctcccctccctgcttgctcagcactcggcttccacaggccacatctatttttcttgcaaatcagaaaatgtgggtacagtgtttttaacttttgaaattttagattttgagatctcacctgacattgagagacactggctctctcaggcagtccactgcacatggagatgtcttactactcagcaaaaaggaggagggggctacagtgtacacttaaattaaaaaccaacctaacacgttgcttgcgaactttaacaaataatacattggttcctttggttcccacagggtaggaaaagaaaatgctgttgaaattattttatttgaaagaaatgccatgttgtatttattgtttcctcagtattgcaagttaaaaatctcatggatttatttaggatcatccatctaagtgcagtgcaaaaggttctgcataaatggagttctgtcattgcatcattaaaagtaaaaatgatcaaaataataaaaggcatttaaaaatgcatcattctttaatacaaagccttggtcagcattcagggaagtttatgtaaagctatataatattttgcttttaagactccataaagatgttataaactaggggccatagtttccatggatttttgatatattcaacttaattttttcattctataaatttattctaatatataaagtgattgctacttttcgttatttttacagcgacttggccccttttaagctgagggaactgaccttatgtgtcaatttccaggggaagatgatggccatcaggagtaaaaggagtgctcaataaggatgtaggtgttatactgaacaagaaggacttagcgggtgtcataattttaaagtaaatagtttttattcctgtctcccactgctccttcaagatgctctcgttatgctagtccttccctgaccttttgagggaagtctctagcaggtaccatttacctttttgtaaaaaagaaaaaaaaaagtaaacttttaattttaaataattttagatttacagaagagttgcaaagttagcacagaaggttcccatatacccttctttcagtttcctgtaacattaactttgtatataaccataataaatttatcaaaatgaacaaattaacattggtacattaccattaaccaaactacagagtttatgtagattttacccatttttccactaatgttttttgtctgttgcagtatccactccaaggcatcatgttgcatttagttgttttatgttcttagtcttctccaaaatgcataataacagtttctcatcccttccttgttttttatgaccttgatactttggaagggtactggtcagttattttgcagagattatttgattggtattgtattaaactatagatcaaattggacgaagttgacatcttcacaacattgatctaccagtccacgaacatgctgtacctctctgtttatttcggtcatctgatctttttcatcagcattttgtagtgtttagcagatagatcctgcacatatgtcaatagatttatacctaagtatttcttgactttttttttttttggtgctagtgtaaatggtagttttgggttttttaatctttcccccaaattcccattgttcattgctggtatataatacaattggtccttacatattgaccttttatctcgccatcttgctaaactcatttattatttacagaagattttttcacagattctgtgggagtttctacatagacaatcacttcatctgtgaatagagagaattgtatttcttcctctcgaatctgtattgccttgttgcactggttaggactgaatagactgtagtacaggggatgtgtcttagtccatttgtgttactgtaaaggaatacgtgaggctgggtgatttataaagaaaagaggtttatttggctcatggttctgtaggctgtgcaggaagcacggtgccagcctctgctcagcttttggagaagacctcaggctgcttccattcattgtggaaagtaaaggagagcctgtgtgcagagatcccagggcaagagcagaagcaagtagcggggaggcgccagactccctttaacaatcagccctcccaggaactaagtatagtgaatgaccaaccctttcgtgagggatctgcccccatgaccccaacgccacccaccaggccccacctccaacactggggatcaaattacagcatgagatttggaggggacaaatgtccagattttatcagagtggttagaaaaaaccacctctccttattcctgatcttaagggaaaaagccattatcttttaccattaaatctgatgttagctatatgtattttgtggatgtcccatatttggttaaggaagttcccttcaatttctcattttctgggagtttttgttatgaactttctcaaatcttttcttgcatctattgagatgatcatttgttttgttttttcttatttagtctgttaatttggtgaattgcatagattggtgaacttaccttacaatccttggatgaatcccaattggtaataatatgttattctttcgtgtacttttatatatttctggattcattttactaacatttcggtgagaatgtttatattctctattcatgagagttattcatccatagttacgtttgcttgtgatgtgtttatctagctttggtattagggtaaatgctagtctcataaaatgagaagtattcccttctcttttattttctgtaagatatcgtatagagttgttatgttcggaagatttaactagtgacactgagtctggagttttattttattttgtttttaaaggtttcactataaatacaattttgttaatacatataagactattcaggttgtttttcttcttaagtgagtttttgtagccttttttcccaaggaattagttcatgtcatctaagttgttgaatttatggtcataggattgtttttggtatctttttttttttttttacatatgtgatatcagcagtgataccatattccactcgaatattgtagttgtgccttctcttttttcttaattagcctgcctagaaatttactgcttttattgaaattttcaaagagtagcttttggtttcactgatttaatgccttttttctgaaaactttcatcatggatgctatagagttcacaatatacatttaaaaatctgaatctacctccacataatgctatgctgcttcacacggagtataaggaccttataacagtgtatttctaattcccctctcccattccttctactattattgtcatacattttacttttacatacagtatcaacacaccagatatttttactattacagctttaaccagtcagtaatcttttagagaacttaaaaataaataattttaatttaccttcctttattccatttatgatgcttttcatgtcttcgtatttatcccagtctctgacctatatcatactccttttgcctgaagaattttctttaatgtttcatgaagagtatgtctactggcagtaaattccatgagatttgtttttgtctgaaaagtctttctttctccttcacttttagaggatatttttactgggtgtagaatcctgtattgagatgtttttctttaaacatttgatgtaattccactgttttcttgtttgcatgagttctgccaagaagtctgctatatttcttatcttgctcctctgtaggcaatatgtctttttttcctctggcttccttaaatattttttatttgtcccttctttttcagtagtttgaatatcataactagatgtagagtttgtgttttgttttgttttgttttgctgcttgatgtcctctaagctttgatgatttggtgtctgtcactaattttggaaaatcctagcccattattttttcagccatttcttctgtcccttctgtttttctttctgattttataattccaattatgtatatgttaggctgtttgatattcttccacagtgcttgcatgctccatttagttttgtttgccttgttttttctctttgcatttcagattgattaattcctattgacccatcttcaagttcagtagtcttttcaagtctgctcatgagcccatcaaaagcatttttaatctaaatactgtttttctgatttctatcatttccatttaattctttttcacttaattatttttatagtttccatttttgtgtgaaattacccgtctgatcctatatgttatttactattagagcctttaacatattagctatagttgttttaaattctttgtctgataggtccaagatacatgtcatgtctgagtcttcttctgatcattgttttgtctctttgtggagtatttttccttgctttttttcatatgcctcataatagttttgttgttgttgaaagcctgttatgtcatataataggacagtagacactgaggtcaatattttgtgtggttggagatgagcatgcttttctttccactgggccattaatatgaaggtttttgttcgtttggtcagagatttggctaggtttaaagtttatcattgccatggttaccctcattctactcgaggcctaagtttctctagtggaatcatgtgttcatagcatgggataatttttcagacttgtctccgtatctgctccccatttgtcttttgagtttccctgacttgactttgagtcttctctttgcactggtcccctcagggaatctgcttcttgcagctcccctgctgtatccttcaattatgtttgcttagtgcttttgagtgtgtgcaggtcatgtgtgtgcagggattgagggcattcttttctgttctgattaagcctcaggcttaggcaggtgcctgtgaatctggggcctgaggctgtagtcctgacaagtgttcctgctccttccctacctgtcatgctgggcctagcatatattcccgcctcccttccaggggtagaactccttctccacccccgttcccctgccctatctgcagtgcgatcccacccctgccctcatgctacagtttttgttttgttttttgctctttctcctgcatagtaaggctttcattccttagggaagatgggggtgatgagtgtgtgcagagtttggtggtagctaccatttctttctgaccacagtaagattctagcagtgccttaaagctttagttttttgtccttcaccctatagattaaagcttttgttcttccaggaacataggggagatacgtctcaggagagttttggcagaggtgcctgttcttcccccacatccagcaccaagtgggggaagctgtcttaggtttctcattgagctgccctgagagcaccctttagggttcctggaggaaaatcctactctaggctcttaacccctttatgtcctggtctgtggggctttatacacgctcactagcccatacttggccttaggcagtttattcagacttctagttgaatcttcctatgggcttatagtgagttcaaggtgtctgtcccagataagcaaatggttgggtctgtttctccctggaaatgtctatctctttctggattttctaggttttgagttagttttttccctgtacccttggttctctgacagagtcaagaaaagtcattagtctgcacttcgtccagcatttttcctgtggtaagagtgagagcaatgttctttccagctctctacctctaggagctgaaagcacaagtttgctgtagccagtttctgccacttaccttttaagtcactctcagaaaaccaaatcgttctttagttcctttaatacccaagataatccccagatcacaaattaaactgtttagtcccacatagaggaaaggctctcggagcgagtttttgcctctcctatgcaatcgtgtgtcaagctggctctctgcagtgggaaaggggctgtggtaggcgtcccctctttatccccacttcagcttcttctccatctctctcagctctatgggttccacggaaccctcccagtttgtagatgtagagactcgggtaggaaagattggcaaaaactggggtgtgggcagggatctaaaggaaggagacagaaagttcagacttgaccagtactttctggaactagcagaggtggttggttataggtggtgttctcttgttagactctttgtggatacccctgaaacccctatatccttgggaatctccaccttcaggccccttaatatgtaagagtgtaccacctgcagctggtaggtcctggtgtcccctccttaactcctaccatcaggggctacacttccagcttctttgttctctcacttgcctggcagttctcttgagcaaagtctaagacactgtttctcacacaatgtgggggaaagttttgcttggtagcctcttgccataggtggtggaagtatgtcattccaatccaccgctcttccactgcaggtgctctggccagaactgctgtggtgtgagtcaggcactagtctgctgtttccctccaaattgccggggacacatccagactctcccagtgtcctcctgaagtcctcacgcttgacttgaagtgaagtagggtaggggctgaactcccagcatcctggcaactttgttcaaagtatttctcctaatttccagctttttgggcagcattttccccagtcttctttggggtagaaatgtgtgaccagctaaagtttgcaaaacaagtttttgacatccaatgctgcaggtcctgttttgaggaccttctaccatgggatgtggaaagaatcatcacatcaacttcttgggacctcaatataaactaagccaggaagaattcaatatttaaatctttttgtcctcattctcctaaaatgaacagatgcttttagaaactggttctaggaagtactttttctctgggtattatttttataattttaaaatgtaaaaacaggcattgagaactcataacatcttaagatatttagagtttaagatattgaaaattacatttcatatttcaaaacctaaaatacaatactatagtagaccttaagtggccaaatgaaagatgtttttggagaggaatggatacttactgtcttttcttttgacacagtggcacttttaatcaagataagtgaccaggcttccatgtgaagtctctagagctaaggtaggagatactagttgggctggattcaccaaatgttagcattttaacacagctctatcagacttcacacaggggccccaaaataatttttgtgtaattgaattatgtccattttaatagggattttctttttaaacgaattctactttgttcttttcttaaagcaaagacttttatgctaagataaataccttctgtccctctgcccctctcccatatttcctttgtataaatcttcattcttacattcagaggtgacgtgggcatagttgaaaggtcacagttaaaagctctagcttcagaaccagagaggcatggatacaaattctggctaggaacagaccccaatccattggaatgaataaacaactcatcagagtggccacttggtctttcagtccctaaaccctcctggcccatggcagctgagcgttgcccctgttttttccatgcattggagagtccgcctctctgagctatgtttcctccacacttgaggccaataatcatcttgcagagttgttaggaggatcaactgagggaccaactgaggttccttgcacatagtaggccctcagcagaaagtagctgctatgacattgttaaacgttcgacatctcaaagagagaacaaccgtgttccctctccaccccacagttcagtgtgcccagcttggaaactcacatctttttggggattagttaattgattggagatatgaactgtatctagtggaggcatgtctttatcttctagagaaaaatctttagatggtttatcccttttaactttggttataaaagtattaaaaaagaatacacaaaagatctgaaaaagaaacaaaatcatctgtaatcctatcacacagagttaaccactgttaacttttaaagcatatcttttcaaacttttttttctatgaaaatatggagattcgtataagacggggtatcatcctaaagtcaatgtggataacccctttcactcagtgctctatcacagacatgttttcatgtcagcaattaacaccttcatagaatgccatgatatggattttctaaatgtatttagccatcaatggaatttaggttacttgcagtgaactgcagtgaactgccttacacataagtcttttaatacatacacagctgtttccttagagtacattcgttgaagtaaatttgctggaacagagggaatgcctattttaaataatgagacatatcaccacattcactttggaaaggctgttctaagttgtacatactcccattaaagcatatgtaatgtccctgtctctgcatttaaaagctcttgaataaaacatttttatagtctttgataaatgagagaagtttctccccaaaatcaaacagtatcttttcaatttttttttcatattaaaagagaaaaactcagttgtttaaaaaataaataaaggcttttggccgggtgcggtggctcacgcctgtaatcccagccctttgggaggccgagacgggtggatcacgaggtcagcagatcaagaccatcctggctaacacggtgaaaccccatctctactaaaaatacaaaaaaattagctgggcatggtggcaggcgcctgtagtcccacttgggaggctgaggcaggagaatggcgtgaacccgggaggcggagcttgcagtgagccaagatggcaccactgcactccagcctgggtgacagagcaagactctgtctcaaaaaaataaaataaaatgaaataaataaataaataaaggctttttaaccacaaacgaagttctcttgtcatgacaactattaacactgtatttatcggaattggtgaaatcttaaatatcatctcatataatcctctctctttgtagatgagcaaagttagatcagcacttagagggttcgaagaggaagagtctcctctgtttctgttatctcttttcttctcacccaccttctcatattcaaataatcatcttttttttaattcctagaggaaatattatttttctcctaatatcagggcagccctgtgacatttaaaattcttttattggaagtctaacatgcatacacaaaagtatacaaatctcaactgaatgaactatcacaaagtaaaagcctgtgtaatcgccactcaggtcaagataaaaaaaaattttaattaacatttgctaatacagatgatcataatgaaaaatgtaaaattgctgtgacagtctcttggactacaacttctatatccgacagtcagtaatttcttgggagaaggtacccagttggtctccccacctttacgattatacttctctgggggacaatctgtaatattctgtgtgcggtaacttgcatagttttaaaacgatccacaccactgaatattcttactattcgtgaagccaaaccaagcagttgtaaggacaaaacatggcggctgcaagagtgtgtgattaggatgacaccactgtggcctaaaaccaaatgctttggtacaagtcaaaaataaatggtttggtttcaagtcacaatttggtattacccttgcagttactagatgaaggtggaggcaaacaactgggcgctttgcatctgagaagtctgcagagagtgagaagtatttgctgcagccgctgggctcagccacttgcccctgatgtcagaactccctggaggcagagaccgcagcaccctgactcctggaccccacgcccttttcaaggggccaggctgtgcttcagaaccttggcagagaaggttccaattctgtaccggctcctggcagccagccacgctcccggtactcagcctcactcagccattcgctgcgtgtccaggatggacacccagtttaatcttgttgttcagtcaatagcttttgcattatctttctttttgtggttaatgtaccatttttcttcttttcttcccctacacaaacactgccatgcctgaagtacttcccctgcttgtagagaagttatagcctgggctgtagtggaacagtgctctgattaaagtgattaaaactatatacagcatgcataattaacctttgcgcggctgtcacagcaagctgatgcatggagctgataccatatctgtctgtggcaggcggcgtatgctacatgaccattttttttttcctgcagaattttaatcacttgagataaagagccaggagagagagatcaaggctgtattaatcttctcaatggctttataatttcccttctattctgctgctggtaatcaagaaaaataatgccgccttaatcctggatgccaaggtcaatcatctctgtgccctttgatagtaaggatgtcattatgaaagggtttttaatgaacatgaacataatgctcgccgcactcctcagggagatggatgcgttctgcaacttcgggatggccaggtgggccttcattgctgacaaaaatgattttaaaacattagctctattagaaataaatcccgaacagctggttgaggttgcagaccagccgtacccagcagtgattgagaaattcaggaatgagctgcagcaggtcaacaggtgagaagggcccaagccctgattagcggttgggcaacacagcgagaaccagcacggggcgggggccttgggtagcctcagcagcaggagcccggcccgcggcgccaacaccagcgcctctctggagggctgccaagatcaaaaaagtgcagcgatgcgcagatgcgtggtgacattttaaaacaatgccctggtcttttttttttttttttttttttttttaagaacatgcagacaggtgaaaaacaaaatcctttcagctcaaacgcacctgaactaaatcccagagggctgagtgctgctgtaccactccctcccgctcttacttggttttcccaaaaacacattccccaggtcgaggtggtggagctgacccagccttcacttcactgaaagacaaaccagacgggctgagagcagttcccgggcctccagaggctgcggctcgcacagctttgccggctgtggttatgaactgtgatctgacagtggaaggcagcacttgttaggaaatctttatgtagcatgggtcacttaccctggtgaaggaaaggcgaggaaggcgtcgagttcagacttcaaatacacatgaggtacctgggattaggggaaagaaatgagtaacaagccgcccactcacccttgagaacaaaagaaaagagagaccttcatctctggtagacaggattttaataagatttgggaaaacacacaaacattcttttttttttaatctttatttttcatttattttcttcagcttttaagttccggagtgcttgtgcatgaggtgcaggtttgttacgcaggtaaacctgtgccatggtggtttgctacacgaatcaacccaccacctaggtattaagcccagcatgcattagttattcttcctgatgctctccctcccctacccatgcaacaggccccccagtgtgtgttgttcccccgccatgtgtccatgtattctcatcgttcagctcccacttagaagtgagaacatgaagtgtttggttttctgttcctgcgttggttttctgaatataacgtcttccagctccttctgcgtccctgcaaacgacaagatttcattcctttttgtggctgcatggtattccatggtgtatacgtaacacattttcttcatccattctatcattgatggacatttgggttgactccatgtctttgctattgtgactagtgctgcaatgaacatatgcatatgcgtgcatacatctttataacagcatgatttatattcatttggttatataaccagtaataggattgctgggtcaaatggtatttctgcttctagatctttcaggaattaccacactgtcttctacaatggttgaactaatttacattcccatcaacaggaaaacacacaaacattctaaagtgagccctcacaccagaatggttcctataaatggttcttctttgtatgtcttttaaaatgcattagatttactttctctcaagtggttcatggtacagcttcccttcacattgagggatgggctacggaagcttggagctctgttcccgggaggctcctgaattaccagctatattagtccattttcacgctgctgataaagacatacctgagactgggtaatttataaagaaaaagaggtttaatggactcacagttccacatagctggggaggcctcacaatcatggcggaaggcaaaaggcacgtcttacctggtggcagacaagagagaaacgagagccaagtgaaaggggaaactcctataaaatcatcagatcttgtgagacttattcacgaccacgagaacagtatgggggaaactgctccatgattcagttatctcccagccggtccctccaaaacacgtgggaattctgggagctacaattcaagatgagatttgggtggggacacagcccaaccatatcaccaggtggggggtggctgtagaggcccacttgaaatgcctttcactcctgagaatgctgcagggagggcgaccttggatgggcagagtcaaggtcaatgccgtatgagccaggagaccctgatgcgggaggcccctctttctcttcaagggctttgctcattcttctctcttttatcatctgaccccaaacactgattctttccttctagaatttgtgtttggactcagtaaatacctccatttggattctactcatttagaatgtatgatgatctgacctagtctgggatgaaatttactcttgtaccatctttgagagaagtgtacatggagccagtgtagaatgtaaatagcattgttggagcgtgtttcacctccttccatgaacaaactgtttttaaggacttagacaccgctgttgtcactatttacaaatgagccttctttttttttttaaaagccaacttggcagggtctctcctggaaaccactttgttagcaattctcttcaccagttaaaatgaaaactgaattataaaaaattctataatttagacattctctgcttcctctgagttactctattgacgcagaaaacaatttagtcatgcatacctaagagattgttctggcttttttccccttcaaatgtaatttaggtaatggaacatttgccccgtttccatagatcagttgaagtgctggctggaagggccgcccagatgtgatcctcataagaaattggaacataggaactgccacactgagttattggtgcagtttatggagctcagaggttttctactggtttctacagagcccacgggttccagggaggtgcctagaggtcttctgaggatgaagcaggagattcacggggtggccagtgggcaggaccccacacacacaggcttcgaccagagaagcctgctttcctctgttttctgcattggggttctcctaggatttgttagggggaaaagaggtttcttaaaagcttaaggccttgtatatagccctttgctctgtctcaatagaatttataaagacaagattgatctccttgataagtcttaagcgaggaacgtgcctgaacggctaagtgcttgttgcagacattatgagcctgtctgccgcacatgaatccagctgtgtgtgtgcacatgcaggtgtgtgtatgtgtgcggcccttcattatttgaggcccctaaaaaatcacgtcgttgccaaaatgagttccagaaattcatccagtaaccagggcacatggggaccaacagaagactttgagcttaaatagtcctggaccccagatcgtgcaggcctttgacctctgttcgaagaaatcaaaactgtgccatgaagacagaaccagaaacctagagtcgtcctctggacctcgctccctcgctccctccctccctccctccctcccattgtctagcagagggatcatcactcttcctccacggtggttcttgaatacagtccttcctccattcctcttgccctagttctagtctcatcattttggcctaaatgacttggtatcttaatttttctgtctccagcgttttctccttcactcaaacgtccacatggcctcaatattcctacttttaaaacatcaatacgatgaagtcaccaaacttaaaaataatctttagttgtttctcattgccagaggatgaaagtccaaagtccaacccccttaggaagatatttaaaactttacacaatgtcattctaagtgattggttttttgtttgtttgtttgttttttgtttgtttgtttttttgtttttttttttttttgagacagggtctcgctgtgtcacgcaggctggagggcagttgcagaatcatagctcgctgcagcctcgacctcctgggctcaagcgatcctcccacctcagcctccgaaagcatggggattacaggcgtgagccactgcacccggccgcctttctttccttgtagctttttgatggctgtgcattatttcatgtcccactagactgaggctcagtgagggcctcttgcgtttgaaagccttgtgtctggcgcataaaaggagttccatgggtttgaactcagtgcgcgggaagttgtgctttgttgtttgatactgttggtttgtgagtatcactgcacgccaggcctctaacgtttgcctctttctacctcctcacaactactttactcagtgagagcagttagcgccgtttctcagatgaggacactgagtctcagggagattaggcacctgggttaactttattattatttaccatcctttgcatcccccatctttgagcacatattgtgtgccaggcttgttctaggtgctgggaacacactcactggaggctgagggcaagtgcacgggccagtgtggggaccggcccctccagctccagctcccaggaactacagctatgggcagagcccatgaagcaagcgtggttagatctctataaatagttacatctctggtgtggctccttccaacttgtgaaggacaaggtaactcctcagcgtgagtcattactgaattacagattagctgatggggccttctctgctacagagtgggcctgggctttaaggcctgggactaggggaggtggaagcttatccctttctcgccataagcgctgtcactccagagcggtgctgcgcaaattggaaaggagataggaaggtgatgtcctttcacccttgacctcctagtgtgtctcccccgacccccaccccgccccatctctgccaatagcccctggggactatggctaaggggtcaggtgcacctgagcctaaacctgcccatccctaaggctgttctggtaattcgggaatgagggatgtccacaacgcgagggctgtgggtccgagaggccttccctgctggccatggcagtccctagtggctggttttgagcgagtgctataagtgcactggcagtgactctaggccggctgctttgggaataacgtctgtaaactgactgacgcccggtggcaacagagttccttgaatttggtaacttgggggtgggctgcgtgggctgtgggggctgaagccacctatgacacacactcatcacattccacagagaatgcagtgcagccctctctgatgatttatttgctctgttttctgtttattgtacgttattatccctgtgctttcggtacacgtgtcacttactaagaacccaccatggctttgtcctatcaagtcggccccgtctagcacctcaggcctgtaccacctggctgcggctcccagccctgccttcctccctcttgatggtgtgggagaatttcgtgtgtctctgttttctttcctaagttgataaacgctgtggtatcaattatcatatctttcaataaataggttagatgttgcttaattgtttagttaattcctggcctactttatttcctgtgatgccgccatgccaagctgcattagttgtacagttccattgaagcctttcccttctcttgtttcctcccaaagttcaaaataagtaacaatggtgatgacaaatgctaacactcatttagcactttctggagatgccggagaaaagtatgcattctgctgttgttttgttgcgaattctcccacttactcctaagttgagttctgagtttggatggtctcagaggcatcccgtgaaaaaaggatttcagtgcaaggggtttatcgaggaggtgatcctaggaggcggtgccgtgccacagggaagggaaggcagcagatcggaggttatcaggcatggtggccccgcagagacctgcagctcagcccctcaggaacaaagggaggtggtgcaaaacacggactgtacagttatcctacgtcagggatgaaggatggatctgggccttctacagcaactcccagcagtcacctttgttcagtgctgcacatcggggattctaattctctggaacatctggtcattgtggaagaaagcagagtggactccagccaccagagagagaaagctgttaggcaaagagatagagatgccggacataggaagtcggccagcatgcgctgtacggctgtagaggacacaggcagcagcagcacggctgcaccagaccatcggggtatttttactttacagataatgaagctgagtcttagaggactaagtagcttgcctccagtaacacttggaagtcttttgtgttctttactctctgaaaaattctgacaatacaaatatttaactttcagttgagttcaccagttgttcagtgagcttggtttctgcctatatttgggttgggtatattttccacttgaccctgcctcaaaagttggcttttggccagacatggtggtaacacctgtagtcccagcattttgggaggctggggcaagaggattacttaaagctacaaattcgacaccagcctgagaaacaaagcaaggacctgtctctacaaaaaatattaaaaattagctaagcatggtggtatgatcctgtagtctcaactacttgggaggctaaggcaagaggatcacttgagcccaggagtttgaggttgcagtgagctgtaatcacactactgcacaccaacctgggcaagagaatgagatctcaatttaaaaaacttggctcttgaagtgccaagcctccttgcatccatgaaacattatgttgcagcctactctgaagagaaaccaatgaggctacgttaatattttttttgaatgatatatttttaattcagacttggagtaattgatgggctaggttatgccgctgttgcaaacaactcggtaatctcagtggtttgacacagcctgggttcatttctcacctatacagcgtccacagcaggtccatgtgggtactcaggggtccaggctgctttgatcttgtggctcccctatctgaagctcagcagtagccctggcaaatcacaaggatgactggagacttgtgcttggacctttcactaattcactccagaaatgataatgacatttctatttccatgtcattagccaaaaaaaatggccccaactaattacatgaaagctgacaagtacaatcttccttgtgcctcgaacaggcaggggaggaaccgtggagtattagtgaacatggaaagcatgtttcccagtagagaagtaataataattgagcaatcatgatcaaggcccgcctagggcatttcctggggatttctgaaaggctggaagaattttgccttgggctgtaaatgtcaattgctcattaattcctcagaaatgcccacagccaaggttgctattgctaataaaattcatttgtttggttatttaacaaaacaaaaaaagcatgttgtcattttcccctggcctgatgattcctgaagcagatgattattctctatgttctacatcatatgagtttgtatcatctttttcttttctacctctccaagtgggtggggagtaaatctcattggcctgaaatatcatcacgggcagtactcagccattgttctcacagctgttttgaaatataaataacaaaaaaatgcattttaacgttaatttcaatatttctttccgccttagcaactgacgtaagatttgctggtattgggttttctgcaaatttttattcaaatgtgttgtcttgtatttcttttgtctgtctgactgttttacagaaaaagtgaccactatgtagttcttgtcaccttaacaataaaggtgcttttcaagtggtctatatttcttttaaatatgtttcagtcaaaaggagaccaaaagagttagtaaagaattgggtcagccttactgaaacaaatggttgaagtttgacttctctcatcagtgaatgatagatgccgcaccttctgcctggctggcacagactccatttgatgtaggaggaactcatacccttgtagcttttcccacgttgttgtgaaaactgcggaaataattccttgttccatgtgagaacgagtcatcacttaacttgatgctgttttcatcatattgtcccatcccacagtctggcccacagcctggcccacagcatcggggtggaaccagaaatggctcctgcggagagcaaagcaggacatgaaccgtaccccgcctctgcaaggcttatgctgttattagtcctgatgtacagagtggattcacagaggcccttgaggaccaaaagagaaaatatattcagtaaatcaatggtgatgcgttaatagactgctgctgtatttgttgttcacagaatgtaattccttgataatggcattttctacagtatatcatcacagaacaatagcaatatcaccacaacaggagtgactttgataaattatacaagaataggatcttataatttagtacagatctaatttaggttaaaagtattggtggagaaggagatttcatttttaacattgttcagaggtacaaaaaatcctgggagaaaaaattcagacatattgtgagaagccaatgcacatattaagttattggtgcagatttcgcaaggttttcacatcttttgactcattctcgtattctatatgttatgctatatgttattttaatgtttcattttactagaagttaatctatgtgtctaaaaattgcaagagtgttaaaaaggaactatggctctttattattttaaaagtggagatctaggaatagcataattttgttgctattgagtttttaactagatgtgttgatattccttgataatgtttcaaggatcctgacataatcaaccgtggctcttgcttcctctgggaccttgaagctcaaaaacccagtagcagctcttagcactcttaaggctgataaaaattgagactgaaagtgatatctaatcaatgcctctgagattcaatcaaatattaagatccttgaggccatcacactatttaattggattcctaatacttctttatactcagatagactcctgtgtccaaaggcactcacattggtgaagctggcagcacatcgtgagaggaggccattctccctgtcctggcccctggcatcccagagtcaggcctacagttgggctctcccaggacagtgaatgaagtgcaggtggcagaaagacaaaaagagggtcgagttccttcatggcagctgtagctgcattggaatctaccgtggtggtgtccagaggtggcatgccctacagtggtaccagtggcattctggctagatgattctttttttttttagggatggtgtcttgctctgccacccaggctggagtgcagaggagcgatctcagctcactgcaagctctgcctcccggcttcatgccattctcctgcctcagcctcccaagtagctgggactacaggtgcccgccacctcgcctggctaatttttttgtatttttagtagagacagggtttcatcgtgttagccaggatggtctcaatctcctgacctcgtgatccaccctcctcgacctcccaaagtgctgggattacaggcatgagccatcgtgcctggcctatatgattcttactagaaggcggaggttgtgtttcagaggtaactagtctcctgctggtctgtcttccaaggccagtcaacctcttccagcttttgtgaactcttgagaaccttccaggaaactccccgctcctcctcctcacttttgtgtaagttaacctgattggtttctatcatttgcaaccaagaacctctgactggttcagtggtcagtattggctcaacatttcctaaatgctcaaatcagacagagccttgggagaccgtctgtccctcattttacagatggatttcagacatggccctagctcagagtcctgcagacagttggtagctgagcagggactagaactctgtcctcttgattccagatacagtgctcttttcacctgtggcctttctagtctagagaattactctgcagacctgcactgcatggtaggcgctagccacatggagttgttgagcacttacaatgtggtacaatccaaattgatacgtgctatgtgtgaaatacacagcagattgcgaagactttgtgccgggaaaaatgtcaatgatctcacatttatgtttttatgttgattgcatgttgaaattgtagatgtgttgggtgagataaacaacatcattaagcttgttttttacctttttctttgtactttattcaacatggctgtcagaaaaattaaagttgcatgtgtaacatggactatgcacacgttgaaccaagctgctgtatgcaattataagaaaagataacacttgagtctctatgggtaacattgggcctgtggttattgtgctgggatattgtatttgtttttgctgtggttaaaaaaaaaaaaaagtagcgggtgtggtagctcgtgcctgtaatcccagcactttgggaggctgaggcagtcggatcacctgaggtcaggagttcgagacgagcctgggcaacatggtgaaaccctgtctctactaaaaatacaaaaattagccaggtgttgtggtgggtgcctgtagtcccacttacttgggaggttgaggcaggagaatcgcttgaacccaggagggggaggttgcagtgagccgaaagcactccagcctgggtgatatagctagaatccatctcaaaacaccatttatttttcactatgggtctaccagttggctgtggcttcactgggcccaaccaggccagcctaaccttagctgggctctatgtgttttacattttgggacccaggctctggtggagccatcactgtctagagcacatccttcaagcaccggaatagaactggaaacacagtagagactcaaagacaggataagcccagtggtacttccactgggaaagaggatgggggaggccccacagtccacagcagtcctagtgtcctgctgggcaaatatttcaaggacccgtaggctgggagtagggggtgtcgattgggcctcagtcgtgctcccggggaggactttccaggccgtggttttcgtggctctgaatctgccctctgccaggtgcactcttctgtcatcctccatggctacctctgaggaaggtgctggaagacatgctctccttcatggctgagcagatttcttaacctgcttcctgcccataggaaggatgaatgccgaggatcgttttagatctcaaatgccacggtctatgttaatccagccgaaagtgtagttatcgatttgtcccttttgaagctgtcctgtttgtttttaatctctttgattccggtcaaccccgtgtgcctacagtcatttttcgtgcatgtcctcctttctctaaactcaattccaagtacactgagcacatcatgcttccaacaggccaaattctgggtctctttctctaggccattttgtgcagttgaaagatttcattggggaccttgataatccaactaaaggtttcggcgcaagagccaatgattgcatctttgatttggtctttacccgtaggctgtgctttcacggccaaccttaatttggtgagaaattgcttcactttaaaatcctgaaaatgttgtattttctctcttccctttcaattgtatttgcaaagcagtgagttttttgggaggaggcaaggtgcatttttttttccttatagcacggtgtcaaaggcattctataacaccagttcacacaggcaagattctgttttgaaaacaagtttagttaggccaattttctaagttatcataggttatttcttttttctttttctttttttgccgggtgttttaacactgcatatcttgggttgccatttttccaacttcctttaacaactttccagcttgccatcacctaaacccaaaaccaatgacccatatttcaggtttttgtaatggcagccctacttctgtgtaccaatttctgtattagcttttgctgcagtaactagcaattctcaaatctccatggcttccaacaacaaacacttatttttcacttaagaatcctgcgagtcagctgcagctctgccgagcttggctgtgttctccacgtctcctcatgccaggctgaggctgaatgagcagctgccatctgggccctgctcttctcatgctggagggcaggagctccggaggggaagcgggaacccccaggatctcataaagcctctgctgggacctggcagccgtcccctcctcccacaagtcatatggcaagcccaaggttaatggggtgagcctgtacccttcacctcctggcaagtcacgatgaggagagggcagagacaaatcattttgaacaagtgatacagtctctcacaggcatagattccaaaaagaaacccaggagagagtcaccatgcctcaaatcaagaacagccatattgcatttctatcaaggcagaagcacaggtgtgacagtgtgacaatgaaccctgagaccggaggccctccagtccaggtggacatccagctatgcagccagctcagtgcagccgaaagaacctgggaggcagtccggaaagctgagttcctcttacccgtatccctgcagcaagccactttccctctgtggatctcaagttcctcttcaatattaaccaagagttaagcagaatcgtgggttgctttcgaggatgccgttctgatctctgccagcgcacttcacatggcagggaacaggctgccttcccaggaggccgagctgcagtagaaggagcatgagtttaggaatcaggccaatttgagcgggaagcccaggcagccgtttaccaggtgtgggtccatcatataccctctgactctgtttcctcatctgtgaagtgaacatcacagcatctaactctcagggctgtgggtaggataattattttatacagtgccttttgctaggaaattttttgttgtgttgagtcaaaatctgatcccttaaccagtgaactccggccccggttctgcctctgcctggggcagcaaaacagtgattaggaatatgggcacgggggtcatcccacctgggtctgaatcgcactgtctgctcctggtcaggatggccggggggaggatccttaatgcccccgcggttggcttgctatgcttatctgtaaatgagctactgataatatcaacttcatagttttgttgtggggataaatgagccggtgcatgcaaactcaagtagctgttattatttcagttggcagctcctcaggtacctgagcctgctttccataccttctgggtcatcccgtatttcttcagggtaagcaacctcacatttctccagcattctgtagatgtcaagctttctgcaatcctcccccgtctagctgtcctcttgagaatctccttcaggagctctggttaagagataaagaaacagtgagggcattcgagttcattatcccagccacgatggcattctagatgtctccacagacattcaggatctgcccagggtcccacatctgtctcttctccacatcttaccctgccttctccaggtgatggtgatttcgtgatcccagtcacctgcccccaccctcaccttatctgaccctggctcctgggccacccacttgccacttggaatatttattgtctaactgattttccagtattaaggattttacaggtttacactggaattagaagttcatctgaactgcctgtgatgtccctgctggtttcccaatggccaggcactgcagagatgtataagatacgagaatacagtcacctaaagacatgggaagttttgtaagcaatgtctcccgagattccccattctaaatatggcaaggagtgttttaagtacttcatgcttgaagcttttcatgcatttccatcgttgcagttggaccagttttaaaatatatatatcataaataatcttcagaacattttaatgtactaccgatggtattaaaagtcaaagctttcacaaaatttaatttacttctccctgtaacttaagaacagttttaaaatgtgcatggctcctgctaaatttaacagcttccccttttgccttctcgactggaggctgcaacaacctgagccaggaggtctggcgactacaatgtttgagtgaagctgtgagatccatgcctgtactggaagctcctgacagcctctgcagggccttggtgccaggctccgggggtggtgggggagtgggctttccttcttagaaagcctctaggctttgcaggttcaggaagaagctcaccagctgggtccagccactgaaaggaaccctgagcctcagtttgcagcccagagatgctccggggtctcgcccagtgcatattcctggagagctacaacatcagggcatcagatccacagaagatacatgtgcttcactatacaccaggtgtgtattgaaactaaagcagagtaatactattttttcttttttttttttttttttgagacggagtctcactctgtccccccggttggagtgcagtgatgcaatctcggttcactgcaacctctgcctcccaagtttaagcgatttgtacttcagcctcccgagtagctggtggcacgtgccaccatgcctggctaattttttgtgtcttttagtagagaaggggtttcaccatgtcggccaactcctgacctcaggtgatctgcctgctttggcctcctgaagtgctgggattacaggtgtgagccactgagccctgccaagactctcatttcctaactcttgattaccagcgtgtctctaatgtacattttactgattcattcctctaaaaatattgttgcttttactcaatatggtaaaagtttctattatagggtaagaagaatagcacaaaatattcaccaggcatggaggatatcattgcagttcaagaaagaaatcataagtagtaattaaggggcttggtacccatagagtcatctcatcatcactgtaataaatcattcttatatttatttattggagcctgaggatgttaaacccttacttttgtatgaccattcatagcttattggtgctttcatctttatagaaacacattagagtctggctgcctcagggcccattccctagtcacttccagccagacatccatgtatcaaagctctagccaatcaacatgtagtggacgtctgctaagtagggcttccaaggatgttttctgtttagaataaaaagggggaaatgtggctagccacatttgaccactatcccttcttctggaacatggatgtaaagctggagacagtgtagccatctcgtgaccacgaagcagtgatgaggaagacaagaagcaactcacggaaggacccatgccccctttctctttccactccgctgtcctgaggcttcttcttcttcctcttcttttcaagttgcgtaaagtggatacttagatccctgaagtcagacctttcttcttttctagtgtaagtgcttgatgccatcagtatccccaggcactgctttaggctcatctccccatttttatgttgggtcttcattttctttcatgacaaaatatcttctaattccctttgcattttctcctttcacccatggattatttataagtgtgttgttaagttctaactctttggcgattttccagataactttctgttactgatttctgatttaattctgcggtggccagaaaacatactctgcatgatttcaatccttttaaatttattgagatttgttttatggcccagaatatcttggcatatgttctgtgtgcacttaaaaagaatttgtattttgctgttgttgggtggagtgttctgtaaatatcaattaggtcaagctggttgatagtcccgttcaagtcttctgtttactgattttctaagttttaaagacattttaaaaaatgaaaaacgaaatgtttatatatttactcacatattgaccatttctgctgttctttatcccctgtgtacattcagcttttggtttggcatcttccttctccctgaaggcatgtccttaatacttcttgaagtgctggcctgatggtttaaattccacccagtgccctatgcatgagcgctggtaggagcacaccctcttcctggccttgtgtgggctgtcaggattatgttgcctcctcctgttatttcctggccttggtagtttccttacctgtatgcacagatcaacactcagcaaaagaccctgaagctctgtctgccacagctgcctcttctgtggcatttttctccactagctttagcctcctgggcctccgcagactctaaactctggcttgttaactcagcaagcccactgggatctgtctggcttccctcagcctggattgggaactctttcaaggcagcgagctggacactcttttgttttccttcacccaggaatcactgtcccgtgctgccggtggtccagtgtcagaaatcgctgcttcacatattttgtctggttttcaagctgtttaaggtgggggaataaatctgattcctgttactgtatcatggctgaaagcaaaagtcctcttcacctacttaaaaaaacttaattgtagcaaaatatacatgtattagtttgttttcacactgctataaataactacctgagactgggtaatttataaagagaagaggtagaattgactcacagtcctgcatggctggggaggcctcaggaaagttacaatcatggcagaagggtgaaggggaagaaggcatgtcttacatggcatcaggagagagagagcagaggggaagaactgcacacttaccaaacaaccagatttcgtgagaattctatcatgaaagcagcaagagggaaattcaccccttaattcaatcacctcccactaggccactgccacaacacatggggattacaacttgagatgacatttgggaggggaccagagccaaaccatatcaatacataacataaaatttagcatcttctccattttaagtctcccgttcagtaagaagtattatgcacattaacatttctgcacactcatcaccatcatgcatttccagaacatttccagcttgctcaactggaagctctttccccatcaaacaatgattctcattctccccttccccagcccctggcacccaccattgtacttcctgtctccttgaattctactactctagaggcctcatataagtggagacacacagtgtctgcccttttgtgtgtgacttatctcagcataatgtctttgaggctatccatattgtagtatgtgttggaatttccttcttttttaaggtaaaataatatgaccttatatgtatagaccatattatgtctttcctttcatgtgacggacacttgggctgctcccccttgtggctgttatgaacagtgctcccatttgccacgttcttcttaatgttcaacaactttgttaaaattatttaaatgcaatgatagtcatctcaccatgtagttcaacttgtttttacagctgtgtgtgtgtgtgtgtgtgttataatgggaagaagatgaaataaatggttatagttaatttgggaactttgatcaaatcccctttctttccatattcctttccttttttcttttcttaaatttcccttttcttatcttttctctcatcttttactcttctctttgctctttcttttctctcactcttttcttctcctttccttttctgctcttattccatttcttgccctcctttccttccatgtgtgcacagtacactgacccaggaagccgccgtgtgcacacacaccccaatcaacatgactgaggtgctacggtattagcatgaagcaactcatattccaggggcagagagaagatgtgaacatccatgaatgtaacctgagttgaagtggcctgaatagaagaacagaagtgcagatacggtgctttaattactcagtgacagaggttatttttggttagggagaatctggaaagtcttcattgtagggccgacagttgacctgaaacctgagagtcgggcacagttggggtttccaacaggtgcaaagattttctaggttacagaaccactagagcaaaaagcgcagacatgggacaagcctgctgtccggtacaatgtcacatcatgatgccattcagacctcttttcccaaagattctaactagcttttttaaactttacagtgatatacagaaaatgataaatacaagtcatcattaaaatggaacaatgaaaattactcacttttcatgcactttgcccttttctgattggttttagactcggtacattgcaaatatttttccaattttatcatttgtcttttgtgttttacatcctgttgtccttaaggaaataactgcaacaaaagagcagcatctcaggaattctcactgatgaaaatgagtcatccgaattaacaaaaagtttgaattactaacttattaatagaattttggttttattatgtcacgccccttgtgtcatccttgattgccaaactaagtcttagtaattagagctcgttgggaacgtgttttaataaatagatggtgattgtttcatttttaagtgccaagaagttcattctttactaggctaaattcatctgtaacatcttatgttgttaatcagtttaaggaaatattttacctttaaataaatgtatttttagcctaatttgtaaacaaattatcataaattctaagttaatggtttcccaattctatagtaaggtgaaacagtccatatctacctcattttattatcgtatcagctcaattttaggcctccttttggtttccatttaagtcatgagaaatttactaaaatatcatatttcctgtgatcctgtcagtcttactggtgactttaagtgaaacaatgtgtgagaattgtctttggaaagcaaagttgttcaccctccctgatctgctgttgaggaacctccatgctcttcttaatatatgagtatgtatcaccctcagtctccctacagaaatattgcgctttaacacttccactttttccatgacacatctgtccttgcccctccttggcttggagttctttcatatctccccatcatctacaggctaaagtctgtttgagagcagaactttgtagccaaaaggcccatttaaatcctatgtctaccacgtgagatgcaacttacaggataatcactcattttctctcggcatcagcttccttgtctaggaagggggagcagtgtggctgccctacagcattggtgggaagactaatgagaaaaggctcagaaagtcctcagctgtccccgggtgcagagtgggccctcccgaggtggcacactgccttgacctcctgagcagtggacaggttcctcctccctcccaggcctgctcagccaggtccaagctgcaccagctccacaggcacgcctgccacgcagccccgtggaagcacctcctctgtcggccatcagcatgtgggccatgctgcatctctctccccagatgtccttgcccaccctcagatatctccacgcatccctgaaggctgacactcctctatagggggcgttaccaggcccctgccaccccaggcacactgagaagtgctttgtccctgcttcccggacctggcacacagctctgctgcaggcattgtgtggaaatcacagttcttacctcacacattcccttgaccgcatgcattttaaagcatttgaatgaatttttaaaaattctaactgtgaaatatttcagccatgtggaaagctgtaatcggataccagtgtatgacactaacatttaacaaatacgaacattttaaagagaaagcagttttacaaaaaaacctaaccctcctcccagtttcctctttgctgaagaaaccatgaacctgaagttggtgctactccttctaatctgtgtctttatattttattacatattttcatccccataattctctggaatagcatttgtatatttttaaaatttacataaatattttcacctttaaagtggttcccctcaaatatttaacacgcgtaattgaacagagtctaaaatttaccaacatgttctgcctgaacaggcttcaatttctcttgcatcgttcatgttttgtggtccgctgtttaggttttatctggtttttcatccccaggttggttataataacaacacaacgtcattttttcctgtttggtgctgatttagcctttccagtgtgtttaactcatcattgcttctctcgtcctgcccatccttcttggcttcatatccttatagaatttctccttcagaaatcatttcccactggaaggctggaaatagctttatttaccctccctctctttttctcccacctttattttggaagatttcaacctgcagaaatgtaaggtgaattaactgaatacctgacacccttcacctagattcacccaccatgagcatttggccgcttcgagtcccctctctccccctctccatttccctcccctctttccctctttgcatgctctgtcacacactcgttttagactgacacatttgcagatttgttgcagacattcctccctaatactccagcgatcttcaacataaccaccataaaatcattgctcttgaaaatttcgcattgatttatgtgtagttctgttatctaatatatcattcaaattcaaatgtgcctaattgtagcaaaaaaaaagacctttatggcttttctttttcaattctagcgtccaattaaggattatttactgtctttagtaaaaacatctccttacccataatctaatcgttccctggcctttcattttttctcaacattgacatctttgaaaactccagaccagttgtttggcagaatgtccttcagtcttgaatttggctgactgtgtattctttgtcagattcaagttaactgtctttttttttcttttttctttttttttcccgacagagtcttgctctgtcaccaagctggagtgtggtggcacgatctcagctcactgcaacctccgcctcccgggttcaagcgattctcctgcctcagcctcccgagtagctgggactacaggcatgtgccaccacgcccggttaattttttgtttttttaatagagacggggtttcaccgtgctagccaggatggtctcgatctcttgaccttgtaatctgcctgccttggcctcccaaagtgctgggattacaggtatgagccaagttaactatcgtaatgaccccatgtccttgtcagtgcaccacatcagaggccacctgatgtcaacttgtcccattattgattattttgagtgtgattattaagctaaatggggaccaacaggtttgtccaaagggaaaggtgcatttttcctttgtgagttatcaataatctgtgtggtaataccttgaaactatgggactattctgtttcttaacactctttactcactcacgggtgactcttgcctcagtcaactattaccacgatgtttgtgtcctaacttctaccatcctttgtgtgtttattaggttagtcttcttctgtaaggaactccttttccttcttcacatttccattcctttttttaggaagggactcttgttctttgtgttaattgaatatgttataatatcccgttactcatttaggtgttaacattgtttcagatttggctgctgggcatggtttcagagtatctcctctatcttttccggatgttctcctctgtctttgagtgtgtctcactttctagcacaacaagctgctccaggctcacctgtatttttcctgccccagccctggaatcagccattgctccaagaagctttggtgcctttgagtgcaatatgatatttacgaaccaagatctggctgctaagtgtgcttattacttccttggtgttcttactcccagactcttcagtggctagaaatgtgcgcgtgtgcatgtgtgtgtgtgtattttaaatcatgagtttacgctgacatctctaattccagttcatcatcacagggttcttcctctcctcccattccatgtttgtgtctcccttctcccacaataagaaccctgattccccatcacattaatgtatttacccacttattcaatcctacaattcacacaaaattgtttttggaattgctataccgatactactgctcactacaaattcagtaagagagatttaatatttccttctggttcttcttgtgcctggaagatgtctcattaagggttacagtcagatattgagttctaaactttcttgccttaatttttttttcctcttccatttgttatattacctatttgatgtatagctaggtttactggtttctttgtaggaaaactttcctgtgtcttaattgaataatatatttgtggatatataaactgttagtatagttcaaaagtctaaattacatgaaaagatgtggtcagagaagcctcatcgccttccctgtccatgccttgtactccattctcaacaatgcttcataaagagctgttttcaaagttcctggtatatcctttctatgttttattgtttgctagtttttgtttgttttgctgaaataagaatatagcacagaatgacagaaaaaattgcaaaccatatatctggtaaaggtcattgtccataacacataaagaatttttaccactcaacaataaaaagacaaatggcctaattttaaaatggacaaaggattttaataggcatttttccaaagaagataaaaaaaacgggcaataaacacctgagaaaatgcttaacataattagccatcagggaaatgcaaatcaataccacagtggggtacctctttactctcactaggatgacaggttttttagtttgtttgtttgtggttttgttttttgttttgtttttttttttttgagacagacgagactccgtcgctcaggctagagtgcagtggtgtaatctcggctcactgcaagctccacctcccgggttcactccattctcctgcctcagcctcccgagtagctgggactacaggtgcccgccaccatggccggctaattttttgtgtttttagtagagacgaggtttcaccgtgttagccaggatggtctcgatcatctgctgaccttgtgatccgcccacctcggcctcccaaagtgcttggattacaggcacgagccaccgcgcccggccgacagtttttttcttaatggaaaattggaagtgttggcaagaagtagatacattttaacccttatacattgtttataggattgtaaaagggtacagctgctgtggaaaagagtttggcatttcctcaaaaagttaaatacagagttactatatgacctagcaataccactcctaggtatgtatgcaagagaactgaaagcatatgttcactcaaaaaatggtacacacatgttttttagcactcatgaaatactgctatgtggtatgtgatggtttggatgtttgtcccttccaagcctcaagttgaaatttgatctcccgtgttggaggtggggcctcatgggaggtgtttgggtcacggaagtgggtccctcatgaacagattagtactctcccttgggagtgagttcttgccctattggttcctgagagagctggttgttaaaaaagagccttgcacctcctagactctgtcttgctttctctctggccatgtaatcttcgcacacgagacaccccttccccttccaccatgagtggaagcagcctgaggccctcaccacatgcagacgtccaatcttgaacttcccagccatcagaattgtgagccaactacacctcttttctttataaaccacccagtctcaggtattctgttaaagtaacacaaaacagactgagatgtggtacaagatagatgaaccttgaaaacattatgctgagtgaaagaagctagacacaaagacccacatactgcatgaatcagtttatatgaaatgtgcaaaatacacaaatctatagagacagaaagtagagtagtagttcccaggggctgtggggagaggggcaatggaaagtgagtgctgaagagtataggatttccttttggagtggaaaaaatactctggaactaggaagtgctacacaacctggtgaatataatataatataaatattctgtaatgaaactagcctggtgcagtgactcacacctgtaatgcactttgggaggctgaggtgggaggatcgcttgagtccaggagttcaagagcagcctgagcagcagggcaagaccctgtctctacaagaaatgtataaaaattagcagacatggtggtgcacacttgtagtcacagctactcagaaggctgatgtggaggatggcttcagcccggaagatcaaggctgcagtgggctacgataacaccacttcactccagcctgagagacagagtgaaaccatgtatctaaaaaaaattaataataggccgggcacggtggctcacgcctgtaatcccagcactttgggaggcctaggaggggggatcacaaggtcaggagatcgagaccatcctggagaacacaatagaatcccgtctctactgaaaatacaaaagattagccgggtgtggtggtgggcgcctgtagtcccagctactcgggagactgaggcaggagaatggcgtgaacccgggaggtggagctttcagtgagtggagatcgcgccactgcactccagcctgggtgacagagcgagactccgtctcaaaaaaaaaaaaaaaaataataataataaaacctacttatctgtgtattttacagtcgtaacttttatgatatatgaattatatctcaataaaaatacaatcatttttaaagtataatcagcaccttttttttttccaattcatatcctggaaatcagcccacatcagttcatagataacttcaccattttttttattttttaaatagctactacgtgtttgttataccacggtttattctgtcagtctcctatatggacatttaaacgactttcactatttttctattataagtaatgccgcaatgaatatttgtgcattatttttgtatcactggaggtaatgttactctcattcttgaatgatagtctggatgtatataaaactctaggttgatatttcactttctttcaatcctttgacacttttgttacattttattttaggctttttatttttctggtaagaaatctgctttcagtataattattctattgtggataatctttccctatggtttttagggttgttttttccttatctttgctgtctacagtttcactaggtagttattttctcctgtttaagaatcattatgtttcttgtttctttagaatcatgtcctttatcaattccaaagttttttttttagaggaacgttcttgctctgttgtccaggctggagtgcagtggcacaatcactcactgtaaccccgaactcctgggttcaagcaatcttctagactcagcctcctgagtagcaaggaccacaaacacatgccactatccctggctaattaaaaaaaaaaatgtggagataagtgtcttgctatgttgcccaggctggtcttgaactcttggcctcaagcgatcctcccacctcagcctcccaaagtgctgagattgcaggtatgagccactgtacctggcctcagtttcaaaattcttagccttattttttctgaatatttctttttttcacttgttttggtctccttctagaactccgatttaagcatatttgcatcttctcattttgccttattttctcttcccattcatcgtttctgtctctctttgctacattctggaaactttcctcaatctctttttcattcagttattttctctttagctttgtcttacctgatgtttgtcctcacctttgagtttttaattccaatgactatatttttcatttgtgtttccatttgctactcttcaaatccaccttttcatcgtgttctattattttgttagaactttaattattttatgtttaatcatttttaacttattttgtagtgtctcccaaattattgtagtaagttcaggggtggaaattctgtttcagaacatactaatctttacaatggtggctgtatgcgtatgtgtgtgtgtgtgtgtgagagagagagagagacagagagcgcgcgagtgcaggagctcatcttcattaattgttacattcatggaacgctcatgctccctgaactgtgccttaccatcaaatggtttcacctctgcttgtgctattgtcctgctggtttcaatggtttagagctggtttaaattaatttttcagattaaggagccctccaagacacaggtagcatttcagtgtcttttttttttttttttttttttttttttgagacagagtcttgttctgtcgcccaggctggagtgcagtggcaagatctcggctcactgcaacctctgcctcccaggttcaagcaattatcctgcctcagcctcctgagtagctgggactacaggtgcacgccaccatgtccagctaagtttttgtattttttagtagagacggggtttcaccatgttgcctaggctggtcgcaaactcctgagctcaggcaatccgcccacctcggcctcccgaagtgctgggatggcaggcatgagccaccgtaccctgcctctgtgtcttttttgatctcctttctagcgcatgctgtcttcttttctccatcaagcttaccttttcatttaaaatttccttcttatatttcacctagaatcttacgtccttgtagcaggaatagggtctgagccagtgtattctaatatgttgctaaaatcagatatatttaaatatattctctctttttttattatgaagatttgtctctatctgtaaaacttaaaacttgccattttagccatgcaacttagtagcattaattacatgcacattgttgtgtaaacatcctgcatatctatttcaaaaatgttttatcacccaaacagaagctctgtacctattaactcctctattcccacctcccctttcgccactggtagctgcttttctgcctagtgtctctgtgaatttgcatattcgaaatatttcacatattcgtccttttgtgtctggcttattttacttaccgtaatgtttgtaaggattgtctacattgtagcatgtgtcaaaaactcattgctttttgtggctgaacactatttcattatctgacataccacactctatgtatccacttgcccgttcatgtacatataggttgtttctgcctattggctcttgtgaataatgctgcagtgaacattcgtgtacaagtatctgttcgagtctctatgttcagttccctgggatatatccctaagagtgcgattactgaatcttatagcaactttgcgtttttaaaacagactcttaccaaaatgaaataaatcacaaaggtgtagcaccgcaacagcagaggtggtgagggtcttacatcatccctcatctgtttaggttaacatatatgatattcaaaattaagagcaaactgcttagtcctagaactgcccagttcttgtttcttattgctcagctgtgtacaccatgtctacccagtgtgagtttcagtggaactagaatactttgattgagcaagggcttgtgtgtgtattgtttacttttaaaaacattgtttcaagagggttttttgttgttgttgttggcttggggcttgggggtgatactgaaccaatactcattcctgctttgatacattgtttcctgagccttctcatctcttctctgcggcttagctttcattatttaacaaacatttattgagtgcccgtaatgtgctggcttctgtgatacacacagagaaaattaaccctggagtaacgtgctgagggctgcggtacaggaaagcacagaatgggccgtgcgcataacccggatgagcgccttgtgtcccgctcactttgcgcgttgggctgcaaacagtgaacactcactgaagttctgtcatgggatggaaaattcattgcacaaatgcaagtggaagcagggagggcaggattcttgggaatgacgccagatccaggagacgatcagcttggtctcattccccaccacgaacctcgtgtcccgacagcgtcgacacatcccttcatacacggctggccagatgctcacccgcagtccactcagcggtccactcagctgcgtccaggattgctgggtcatttggaaactgcatagagattcataggcagcttcccctaaaaagggtgatattctgatgcttagcccatctggtacagccaccattcatctcttccttccttcctttaaatattccgcaagtactcatctcaacctcttctcacacctaagcctatcctgataattgtcttttcctccaaatcctctttaatatatttttcatgtcaaaggggaaatcatcttcttttgtaagagaatacatgataaatttattttccctgtgtctcccggatgtctagagcgggagtcaggaaaaggaagcatttttggggggacttaggaggaaagaattcatttttttttttttttggtaccttagaatacagagacagtgatccacattagaaaggtatgggttggactctcctacttccctaggatgtttcttctaccagtgtgggtgacactggagttggggtgggccatcaggagatggaggtgagcctgccccggatggctgccccctgctcaagtgagccagggtgggaggagatgaggaagacagcccctctggctgtgccttttggcccccttttctctcagttgccctaaaagttatttattcctggagttggctttagaaataaataggaagtatcttggcataagtcagagaagggtccaaggcagaccatcttcagacgcagtgagaccctcatcctctactccatcatacacctgttttccattacggagttctgctgtcctctagttcagctctgctctccagcaggctctctcgggtggtgaccagatggccgccaataactccagacttaaatcctgcctgggctgcggggcggacaccccatctactgtgcaggcactgctgttggctcctgtggagcagctgtggagcaggggtgggtggagtagcctctgcccatcctgagggacctcctccgtcctccagttgtggcctctgctcaggttcatatggccacacagcaacactgtctaccttttatgcttctgctgatccctacctctcccaaagacagtaagctcgggaaaaggggacagtgacggtgttagtgaccccaccacacccactacagtgttgagcactcatcacatgtgtgtccgtggagctggcctatatgcgctctccagtatgaggctgtattatgtctaaggatacacaaatacacggctttaaagtaggaatattttttaatttactacaaagaagctcagggattaaagaaccatccgtctcttaattctcatggtcgatggctttatctttttgcatagcgtgcttgcctaaagcgaggcacctcttcatatataaatcagcctttttttgaataaaagttaaatacaacaggatggaaatgcagctttgaaaacctataatgagcaggagggattattatgcatctacaccccggggaagtgaatatttcatgttagaaaaagtagaggccaagggcaaggttcatttaaaatgtataaagataataaaagcgctcatggatggaaaggccatctgaaaggactgttcactttttggagaggctgatgtggaatcattgtgtttctttgcagggggaaaaagaaaaagtcctgtgtgcgaatggccccctgcgtggtgctgcgtcagcagacaggagcattattttcccctggaatgtgcagcgcttggtgcctctgttctctctgtagtgcacagagccaagcagagagagaggctgagcgtttcaaagagagacaaaacaaaaacagattattctgctgtgctgccacatcaccacagcacaatactctgttcaaaattgtctcttgtcaggcacattcttcaaacagtattatgtgtacaaagactctctgtgttggagaatttgcatgtgtagggaaaatagctgcatagtgcggaatatttcctgaagaggccagatttctgtgtgtgtatgtgtgtgccgggcatctgtgtccttagcattttggaaggtgcctgagctttcggaggtcaccaaaaagtactgagtcatcgtgccattcggttaccttcggcgctaccatcctagtctgaagcttttacaggcctctaagaaggtcttcctgagaccccagtcttgttttttgcataagtacgctgcccaggctccggtgattgacaggtgtagaatgggacgtcctcctttcccagttgcatgatacatagtgttcagtgttaatttctggaattcaggtcacttgaaaggccaattcttgggcctttctgcctgaatggctgatgattcctctccttgcatccctcgtgatcaattatccagaaaaactgattattcagattgttaaatccccagttagtccggataatcggcattctgttgtatcccataaatgtggcccacgctgtggagcagggtgggcctcttcctggggccctgtggctcctctctccccaagctcaggcgtgctgctctgtctcccgctgcctgctcttctgggcattccgctctcctccagcgccactgatgcacagcctttccaagagggtggccttgcctctgggtcagctctccattttggggggactagggtggcccggctggaggcctctgcagtctttgtaactgggacaaaagttgaaaggacacataaaaaaaattacagataaacctgaaggcacatgtgctcacatggctgctgtggctgtgggattgttccttctgcctgtgaaatggctgaatttaaaacccatgcttctttgtcctctagatcctgtacccccactttaggaaggggcagcaatcagaattaggcagcctactgtctttgttggggggctgtaacaaagtgccatagacagagtggcttgtcagcaacagaaacttactgctcacagttctggaggctgtgaagtccaagaccaaggcaccagcacattcggtgtctggtgagggctcatttcttggtttgctgtgtcctcacatggcggaaagggcagacgggcttcctcaggctacctgaggaagggcactaatcccattcacaagggctctgccctcctgatccattctcctccccagagctccacctcttaatgctatgaccttgggtagcaggtttcaacatatgaattttgggaggacacattcaaaccacatcacctgcccaaggtcttacagccggtggtagcccaggccagccatctctttactgtacccattttgtctctagttctgtattaggtgttggaggagggaggtcacacagatgtgaaaatgagtcagctgaacaaggagcaggccctgccctggaggagcttaaggggaaattataaatttccctcagtagtgaatcatgctataatctagtgcagggtgcaaatatgtgacctgagggagctggataaagtactcaccttgctgtggagacgtttgacttgcacctggaaggatgactcagagcagagatgaggtgggggagggcattctagggaaggggccaacttgagcaagagcttgtaggtgcgggggcgtgcagggcaagggggccctgttcacttagaacaaaggatcggccaaggaagtctgggaaacaaaccaaactacagaggagcttgagcagagtcgaagtttattttgttccctcgttgaaggtttaaagccgaggagctacgtgatgagcgctgtgttttaggaagaggactccgtaatagagaggatgagccagtggatccatttctaaatgtgtttcttaggctataggaggaggagctttctttatttattccaaaatttgctttcagatgctaatgcgtgtattgtgaactctgagaagagagagttccaaaatgtatttgaccacaaaacctctttttcacggtaactggtgcacagtaggcactcagtgtttttgcatgaccaaataagcaagtacaacaccagcgtgccacagagtgtggttcaagaaacattgcattctgtgaggcgctgaagcaagaagaaaggccagtgagaggctttgatatttatccggggaagaggtactgattgctcaagctaagcttcagtggactgaagatagggaagccaaccacccacaactcctccaaatacctccctctcccaggcaggcatggctggggcacccgcttctgggctctcctgccccctgggcccaccccacggatggcttttcatgcatttacttatcattctcctctggcagagaccggcacggtctggcccgtgggggctcaagacagttgacagaaggaagaggaaggagacctaagggacttggcagctgggtggagaagaagacccgatttctttatttatacatggacttgcttgaaaaagatttctagtccttaaccaaaaaaaagtgcagtgacctttccactacgacatctgttcccacgagatgcaagtcacagttttcatgtaagggctcaaagcaaccgtggagggccgaaggcaagcaagatgtggatcaggctcttgtttttctcttctcttcatcttcccctccccttctaaagtgagagcttgtgattaaggagggtttaatgacagggaaaacagttaaaatgaagaaggagttgcctgaaggaagcatctgggaggtgggcagagcaaggggtaccgggggccctgccatgaagccttcagggcatcggtatggaaatgcctccagctcctggctcgcgctaagcgtacctggttctctagatggctcccggtcttcttgcctcctggcccttccctctcccctcctctgacctttctcttacacttatctttttttttttttttttttgagatggagtctcgctctgtcacccaggctggagtgcagtggcacgatctcggctcactgcaacctccgcctcccaggttcacgccattctcctgcctcagccgctcgagtagctgggactacaggcgctcgccacaacgcccagctaattttttgtatttttggtagagatggggtttcactatgttagccaggatggtctcgatctcctgacgtcgtgatccacccgcctcggcctcccaaagtgctgacattacaggcgtgagccaccgtgcccggccctgttacacttatctttattcccctcatccattcttttctctggactatgttagtgctctggtaacatcctttccctcattcaatcccaactctcctaaacccccttgagtatgttcaccagtggtttattgacatccatctattcttgttctctccaagcccagcaaaaataagaaaacatattttggggtagacagatgctgacccctgacaatttctctttgattttcctccacattttctctttattttttgcttcactaacctttaagccagagtaaataaaaatgactggagatgactgatttgccccagattacacattaagttagtggtgatactagcgccagggcccagggctgactctgctataccatactcccttccctgatggtgcctgcttttctgaaagcttcttgccctattataaaggaagaagcatctactccagatgttgaaaaaggtaaggagcggttatgaaggcccagccctggggatagcttagcattttgcatttagtgcaaacccatttgcagcttttcctcatatttggttgaaagcatttgcattatacagttcatttatgcctttatcataattaggtgcaagttgctgctgcaatatgcttgtctgcattattaccgtacttgcctattttcattcctgctcatcctacgttattgtgtcttactgggttcatgtcaaatcttttcaatgtgtataatattctgctttcggaaatcaggagggggcaaagattgttatgtcaaaaattcagagaaaatgaagaaatgtgtgtacatgtgcacatatagagagaaactgcattgaaatcacagcgagattgtggcagaaatgagaaaacctaagattaacggcttagagggtttttatgctcctggaactcagaaatggtatgtttgcagttgctgcacaaacatggtctaattgctgaagctatttttaaaaagcacgctgaaaccatgaagctagggaagttcaaaggcttgctcttgcatgtgctcagtcatctttcccaactcttattgcaaaatgattttttgcttgaggacagagtgttgggtatctgtgacagccacggtgacatgggctgggaggtgtctccagagcagctccagcagatccctgatggcccactgggtaattaaaagctaagtggaatgttgaaaaaacgtccatacaatttgatcggtcaatttgcttgcttttttgagaatttaaatgagaccttcagaatcatttgaacttttaaaaggaaatcatttcaaaagtcgtcgaaagcgagtgtgtttgatgtgtcttaagtgacgggcaagactgaactcattttaggtggttgttgatagtatggatgcagctgtgaaacttgaatcagaatcatgcgccatccttcagtcaactttgtaaggcacatttctcccggaaatcccacaactgttgattattctcttgtacggccgtggaatctgagagctttcaattagcccctaagggcacgagaagttgagggtattttccaaataacagggtctacatgcaaatgacgtggtaggagcaggggtaggatgagccagagaaagctggagcctggcttctgccccattctctccagctcactcgctgtagaaagccagtggctaaaggcccttgttggagccaggggagtctttggtaggagacccctgaagagcatgtaccctgatgtggtttggctgtgtccccacccaaatctcatcttgaattgtagctcccataattcccacgtgttgtgggagggacccgtggggaggtaattgaatcataggggtgggtttttcccatgctgttcttgtggtagtgaacaagtctcatgagatcggatggttttctgaggggtttcccctttcgcttggccctcattctgtgtttcccacctccatgtaagacatccttttgctcttccttcatcttacaccatgatggtggggcctccccagtcatgtggcactgcgagtccattaagcctctttttctttatgaattgcccagtcatgggtgtgtctttattagcagcgtgagaatgagctaatacatacactaaccaagcaccctctgtggctgactccaagttgtcatggaagttgataaagtacccttgagagcttagtaccaagtcacgtgctgactgactgggttttacacgtcctagccaccttccacccagaccactgtatccaaaacctggcctggccacgttttggataactttttacttacttttttatttagtgaactacagtttatttgatcattcttgatcactttattaagcggaaggagatgttaatctctgaaaagtctatccttttacttccctaaaccaaaaagtgactggagcagatctcaatagatgagaagtttattttgtcaaggttgagggcacacccaggaaaaagaaacacaagtcatagtaggatctatggcctgtgctttttccaaagagggtttttggaacttcagtatttagagaaaagaacaagcaagagtagcggggggtgggaaagagggagggagaggaggcaatgaggccagtggtcacattcctgtgaagccctgaccagccctcagtggatctacattttacatgtgaagaaagggaatcagggaaagtcaattatgattctctctctgcttagtaaatctacactttacatgagttaaagtaaacatgtgacatcatagctgtctgtttgggaacaaaaggaaggcagtgttttgcatgactcagttcccagccctaacttcccctttggcacagtgagtttggggtcctgagtttctattttccttgcacacgtcttagtgctgtgatagaaaaggggtttatttgaactcttgccatctttgtcttaaaagatgatggaaagtcaactgtctgtggatgtgataggcaaatcagttgttttaagcaattcttaggtaagatttaacatggcctcaactaattacttaagagacagctaggaattatttctgtttgcctgtactttgcctctgtatgtgtgtgtgtgcattgcatttctagggaaaatattgaatagcagtttcttttttgaataattatgtattagagaaatttagcaatattcttcccaaattctatatactttacattacccttcattttaccttccagctgatagaagagggaaaattgtagattattaattgatagatagatagacagacagattgtcagggagatggatggatggatagatagataatagaggactttagcttatatagcaattcctgatacaggcacagatgcagactcatagtataaagttgcttatcatggcaagtgcctgacatttcaccattttgatgactattctaggcccaaaagctcacagactgggggcaaatcttttccatctaaaaacactcccatcatcccttaacaaactgatgacaacataattgttttctatcaaatgaatcctgaaatagtataaaacatacaaaaattcagtctgtttcatggagcatacaccttcaaaattcttttcaggcttatttttgtcactaaataaaaatcaatcacttgaaagcatacgtctctgatttctatcccttgtcttataggcaggtgtctctatttccaagtcagcattcattatgcacttagctaatatttattgaacctctgtgttctgttggtagttatgagtgtgatgcaggggtggctgggatatcaggtgtcctctttgagggtttctctccagggtagacgggaagcctcattgcatccagggtacagaaaggtgtgacagattccccaagacacgggctgcactttggggcactgtggaactcacaggtgagcccctccctgtgctcaggggcatcaggttgtccttcaggggccagcaggtaaaacggactctgagagcagaggcctgctaagaaggaagtgggggtgtgggcagtcaggaagtcatggcttctgtttgagtaaagcctgatgaaccacactccttacccagggttagaggaacgtctatgggaccagctgtcaaattaaaagcataagtcacacattctatttccagagcccacaaggaggaaaaactgagacttcctagacatgaatttcatttctgacaggcttctctcctgctacatacatgcacattatctacacacatgcacatgtatgtagatagcgtggcaagtgcatgcacacacaattctgcacacacacctcctcctgcactcaaggtttctggtctccatacaaagatgggaagatttggggctcagggattttgatcaaaccctcggtaaagcagaaaccacctctgttgtacttctagttttctgtttcagggcccaagaaagtccatttcaagggccttatgtgtaattcacagttttgttggagtccccttctaggtagacaaaacagaggaacctttcttagactggatctcagttcagccatcccaggggctaccctctcacctcaaactcaacagaagatcaggaatctgggggtagcatgggccacgtgtcttccctctcaacaccgcggtaccctggagcaggggttcccaacccccccagccacagactggtatcggtccatggcctattaggaaccaggctgcacagcagcaggggagcagcgagtgagcaagcaaagcctcatgtgtatttacagctgctcccatcgctggcattaccaccagagctccgccccctgtcagatcagcggctgcattagattctcgtaatagcacgaaccctattgtgagctgtgcccgcgaggcatctaggttacacacgccttatgagaatctaatgcctgatgatctgtccctgtctcccatcacccccggataggaccgtaattgcaggaaaacaagctcaaggctcccactgattctacgtgatggtgagttgtataattatttcattctgtattacaatgtaataatcatagaaataaagggcacaataaatggaatgcacttgaatcatcctgaaaccatccccccgacattggtagaaaaactgtcttctgtgaaaccagtccctgtgccaaaaaggctgggaccactgccctgaagcactcaggagacacctgcatgccactcaggtctctgcaggaaatgacgctggaccggcggttctaccgagagacttcctgtcttagttggccccatttatcctctgacggtttcccacatacatggcttctcacactctattcttctcatggacatattcgtgccacttgcagttccacatttcactgcttttcagattgatgtgttaccggagaattattcttctatctattattattataacattcaccataatcatcattagcccattaactcataactattactatcattgctaatataatgactgttaactaaatatgaataatgtatgctatcactaatataattactattattaactatattccatctcacataatctatctcagctgcttcatctccctctgcctcctttcaccttccccctgcctgatgttacaaactgaacaacttagagttccttgaatattccatgagcccggcttctcccccaggccataatgagggtatgtcagtgtgcagtgcacaattagttcctctgccaaggcaagatctggggtgcatggccggccttgcagcccgtgtgggtgtcccagtcttgctcttgctctttaagtcaggtgtttgcctctgctgctgccatgggaaccatctactgctgcaggtcaggcatcagaaaagttgtgtgtcctgccctacacccgtcaagtgacgacagatgacaattggaggggaaggagaggaggtcagaggaactggagttgcactcgtaccctccctggtgaactgaaagagcaccctccctggtgaactgaaagatagacaatatccataatgtcgaggcattgaccaaaatcttaccacgtgttttgtgctccatagaatctatttcaatggagcaccggctcttagagcgcttaaagattctgctttattaactgactccatgttgctctactgggccctgtggagtagttaacagctgttagcttgaaagaacgtatggttttgttgggaactgtaaggtgtaattaattcattaggacctgctacatgtcagaggctgcgtgagacaccgggctgcactcatacctcacgtctcagacacagacttggacctcagggaggtcacatccctctgaggaagagaccagcaaaacaccaatcagatgtgaccagtggcactggccactagagtaagcacctgggctctggggtcacagcagagggggcaccaccagctctgggaaggctttagggagtggatggcaattagaactttcaggatgaaaggatgtggttcagaggactgggggagagggcagcacagacagacgaagccacgtgcaggggcactgagacagctcaggaatggcggtgagttcacccccaccgggtcgtgtccgggaaaatgatggagagcagcactgaggatcagcaggggaagatcacgctgtgcatcctgagtcttctgggcttcatgctgtgggtcggggtgattcgttgaaagatcttagcctaggggtgttttaggaagatggcacaggctgcagcatgtagaccaatctgaaggaaagatttgcagtcttgcaggtgagatgtcattaggccttggactgagacaggagtggtaagaggggaacatacttgggagtctggggggaaggtcaaggtcaaggtcagcgggatttatgacatggtcatctacggggagaaagagccagggagtagcttctaagactgtgtttctagctggagtgactagaggagtgagggtgatcttttcagagctcaggagtatgtaaggaacagattaaggtgggagggcaggaaaaaagacaaaacagaagttctgcttggattcgttgcattctagctgccaagatggaactatccggaggcaaggcggcacttaaactgcaagctggggctgcaggtggagattcgggagtgactgttttaggattaatttctaatggcctcagataagatgacccagggtaaagggagactatgcagagggggagcagtgagagtgaagaggaggataaataacaatagatggcattgcatgggacataaagtgactgctcggaggttatttacgggaagatggatctcgcaattgagtgctgaagaaggcgtttggtaacaactggagccccttctctgtgccaggagcgggcactgaggggcacaagtgattaaataccacccctgccctcaaatgaaagccaacatagaaacagataaactatagatcaagtttgcaattcctagagttgagatataaactaggtactatgggaacacagagctcatttttcttttttattagatgagcaataagtgttaaatgtagaaaaattagaaaatacagagaaacagaaaggacatatatgtaactcataattctacaacccagacatgtggctatgaacattttcattcatgtctcatacaaataaaaaatacattttttagcaaaatgagatcatacagcacacactgttttgtaaacatttttacttcatattttattatttctgtagtattaactatgttatcattttcaataactgcctagtttctttttttagcaaatgtatcataatttattaacctgtctccatcattggacatttagattggttcctggctttcaccacattagacggaatggcaaatattcttgtagctacatatatgcaaacatcaacattatttctttacaataaattcccagaagtggaattgttgtgttacacgatgttctagttaagctctttagctataagaactagacctctcttctctatagacttgctagctccagcttaaaagtagagggaggggatttttatgaacaaaaggaaatgagggaatctaaaggcgccaagaagctgattcctgcaggcctgttgagagactagaaattaaaactccccgggccaggcacggtggctcatgcctgtaatcccagcactttgggaggccgaggcaggaggatcacttgagcccaggagctcaagagcagcctgggcaatattaccagaccccatctctataaaaataaaaaaaatcaggtggacatggtggtgcgtgcctgtggtcccagcttcttgggaggctgaggtgggaggatcacctgagcccaggaggtcaaggctgtggtgaaccgagatcacaccagtgcactccagcctgggcaacagagttaggccctgtctccaaaataagtaaataagcaatgaagctccctggattccagcccctgttactcaggagccgcagggcctctcacccatgctcctctgtgcctctctgccacccttctcttctttaccagcctggtttgcttacttcttttgccataagactcaattttatgtcatggcccctcagcttcagtggctgacggtagtctctgccttttagttaagacgccggagaaggtgagtctgattggcagattcccaccagtcctgagttctggccagctaagctcgggcagccatggatctgggggctgggagcaggattcagtcgggatgtgctggagcccacttaccccagctagtgagagctgaccctgggcacctcctcccagctccaagttcactgacgtcatattgggagcttgaaatcggctgtgccggatttacttacagcaagaaaaccagtaagtgctgagtcagggctggtcgtgagatgttcctccgaataccactgggtgtcacatggaacaaaactctctgactccttgagaaatgagtatggccagtgactgacatctttagaatatttctgaaacaatgtaatctcattaacattccgtagatgttacttcattctgttattgtgtttaatgtcccagagaagaaatctagttttgggattttcatttcttttctttagattgatatgttgttttatctgtctgcactcttgtcagtttgatttgcttacaaagcgtgcacgttttactgggctgcaactgtggtggggcgctccctttgctggttctcagtaagtccattttatttgaagatgcaaatctttttccaagtcggggaagtttttccacgttgttaatttgattaatgtgtttctttcacttacagtgtattcaccttctggaattcctactgtgcttatatttgatcttttgggtcaatcttccattttgcttatcttttcctcatcatagctaacttaatctattttctttgaattctggagaaaactcttgattccagccaggttcactgatttgattgtatgcactatccagtctgttctttcgagcttctgttgcattgttaattttggcaattgtattctcatctgaaagtagtcttttctgatctcagatgattccattttcatatttacagtgtgttattgactcctctcaatgagttatttgattcagattctctggttgatctcaagcagtgtaattcagaaatttcttaaatgttctgtttcataagggtgatatttctttatgttctttaaattgatcccattattatggacttttttttttattatgagctttattatcagggctacttcacttttattttgccacattaatgaatgtgcaggctgtattgagagcctacagttcactgcaattgaatgaagggaggtttgttacggggctaaaggaattcctttccctgtttgttttaataatcgagaagttgcccgggctctactcttctctcaccagcacttagtgtgctcaagaggttctctcaatggagcccgggactggcagtgtgggcatcccctgagtacctgccagaaatgcccggtccagaggcaccagctcagaaactctggtatggggcctgggaatgtgtgtcttcacaagtcctccaggttggtgccatcaaagtttgggaagtgcctatttgctcaccactgggcttccagccacagcaagggtgagccaggtccaagttcacgtttagtcccctcatggcaacatctgtgcactttcacgaggcatttgcagatttgcccagcctgtacctcagccctcaagctgctcctacccggaattctgacctctgtggagtttgcagggttcctcaggggttcctttcacttcgtgtccaggtggacttgtcttttgcgggtggggaatttcaggttgggcagcctctcccttagacagggcttgctcatgctgtcctgcaggagctccagtgtgggtggtcgtgattttgattctcagcagaaatgcagactatttccctactattttttctttggatatttctatagagatttaggaagaggtgcagaatgggaggctcaaatcacctggaggcagaaattcctctttttttttttttggatgacctaagggagatttacagagtaaaggggacgctgttgtaaccatccaggtggggatgaggagggtctggcattggggatggggaaaaggtggactcctgagtatttctgagatccagtggatcagcctgaggagcagttgcgtggaaggagaggatgagttaggatggctcagttcattcagttacagtgaactgtaggctctcattttctagcgcagctgccctgatgacttcttggaagacatcaaattgtgtttgacttgggcagaaggatggcactggatgagtgaatggatggggtggccattcccaaccacagctgagcacgtcgtggtgacggggtgtgatctcccccacccctgctgcacccagagctgtcctggtcacatgcacattcactgtcagacgacaaacagggagaatgaccgatgctgccaggaattctgtttgggtctcgtacgttatcatctgttaccagtgacagtagtgtttgggacatttcgccagcttcccggagaaacagccctttttcctcggcctcccggcacctgcagtccgtccgtagctttcccacaacccatccctcagagagttctggcatgctaattttcaggtttaccaagtggcatgaaagatactaatgaatttctttacccgtcgccctcctcctagctgtcatagctcttcccacttgaagtgtttgttttccttgttcctgtgtgtgtgtgacagaggtgaggggtctgctgccttcatggtggacgactcacttgtctggtgcttcaagcctggggtctgccttcctaataatggccactgtcattttcccccagctggaggcctgaggacatcagcttaagcctctccagggctctgggacctgcaaggtccagactcttaatgtgattcttgacaactgatttgtcagctcattttccccttttctcaatgtcctgttgtagctcagtctgtctgcttgtcctcagcgtgtaataaaacaaccccagacaccccactccaggaaccagggccccagagctgtcccacagcctagtttaggactgaagccccagatggcaccccctgccattgggaactctaaggagactgaacaggaagaaacacagagcacatcttccaggaagaacctttgataagctgagaactctttgccctttatttaaaaagtaaaaagaagcgaggaggagaagctgcgtagaagccctgccctctgagtttgcttagaaaaagcacattcaagtttgcatttaggaatcgcagtcagtgacgcatgcttgggttccctgctcaagctgttagggcaaaagcgacggcgtttctaccctcatcaggagagactgcctctatgaatctctcgtcgccaaactaagcagttttaatccagatacagagtggagacagatgaacgcatgcaggatgcttctccagagacggcgtgttctcgctgttgtcagccatccagacagggtgctcagagggcagccttggggcaccctgcagtgggcaggcagcatgaggcacacggatccttccttctcttttcagctgaagaaatgctaaagagaagtttgtaaaattcagagcctcatctcagagggaaagatgagttaatgatctgctgcagaaggacttggcaggtgcgtgctccagccggctgagaagacacccacgcagccctcccaccatgctgaaaaacatagggtcagccattggcactcccccttttcccattgatgaaacggaaattatcttttggaattgtgctgttaacaatactctgtattgccacaagtaggtttttgcaatatgttgaacaaacgtgttatcccttttcaggtcctaaagtaaagagggtctcaggagggtgtaagggcagcacgtgagagtgtggcctgtgaggaggatgttgagtgacttcagggaaatcagtgtcacctatgcagagtcacaagctggctttcctagtcttccagcacctggataaatccctttttgtgcaacaagcactgatggagtctacagaagcatgcattcccgtgggaagggcatggctttggtgctgagcctctagatggtacagacaggcatcagggaccctttggccactcatttaaaccctcagccagaaggaatgaaatcactggggctgtcatgagcaatgaaaatgacaatctgcactttatagacacttagcatagtgtctggcatacagtaggcacccaacataccttgagtctgttatgttttgtctatcagctgttacatttgtttctattgtcttttctccagttttctctgggattggttagagtgaaacgtcatgaaattgtttttattttattttaaagacaggatctcgctctttcacccagtctggagtgcagtggtgtgatctcggcccactgcagccctgacttctttgggcgcaggtgatccttctgcctcaggctccccaggctggtctcgaactcctgggctcaagctgtctgcccaccttggccttctacagtgctgggattgcaggtgtgagccaccgtgaggtcctgttttgattttagactcatcccttaaagcccaggctgtcacataccagccaccactttctacgactccgtaaggcacggtggttcagaacacaggctgtggcatctgcagacctggctttgtgttcaggctcaaccacttagcaactgtgtgacccaggccacatcaggcttcttacctgtaaaacaggaaccacaggccttttgcatttaggggcaagggtaggcagatgccacatttccagcaggacttatgggacatgaacttaataaaagtctgctccagtagcctgagcacctttagggcttaacttgggggcccgtcaatgcctccaccgcgctctcagccacagaggaattcctgaactgtccaccagtggggttccgttatttcctgtgatgggcaggtagggctgacactctgttctccagtgtagatttcatagtttggatttgggcggcccagaaatagcctgcgagatcttactgaaccaggtctgacgtcatcacactaaatggaaaaaagttaggaacgtgctggtattccagaattcttttcttaaaaaagtaacgttccaaagcaaccatattgctaattgaaatagaattttttttttaaattcaggaaatgttgggccctttagtttccctcctatttttcattaggtattttggagcatttcatttattgagcacctaccgtgtgctggctgctgtgttatatgcatcgtacatattttgttctcacaacaactctggaaaataagcataaccccttttctcctgtagtaaaggggaacttggaaggaaacagaagcctgccagggtcagagagctcatgggcagccaaggcaggacttagacttcacagtcagaggcctcaaagcctgcgcttctcccgtgacactgtcatttcagagggtgatggtccaccatggctgaagaccaaattcagccaacagctgctgcagccaagagtccatctgtctcctctgacactgtcatgtccaacctgtttgcctgaacatactttggccactttggagtattctgctcagaagtaaaaataatgtcgtcaaatttcataaatagatttctgaggtatatacttctccgcaggaacctggctcacttactgtctttagataatggaaatcgtggttgcaactgaggttctttcctaagttaacaaatggttgttcctcaccgcagaactacaggaatgacccttacaaatgagcagattctttgttttctcttgattgctggcagcagctgctgtgggtgctcagtagaggaatgtttagtgagagaaactgagctagtgttgcagcagaggaaaaacactaggaaattgacgacttatctttccatttgcaccttcagaaataggttaattgtttcagtgactgcctctgtcttgattaggaagcattaatagcaattaatgatataacttcaaaaaaggtataggaaaattaatagaattctccgttaatataaattatactcattatctactgtatccagaaccatcaggcctgccaagctcgttgattaaagtacaagtggagttttttcggtctgaattctctagatagttaaacctttatttatttatttattttgcagtataaaattccccacagtgagccaatagtattatttagtttaaaatccctcaattctacaacttagaaacctttcataagttaattttattaatgtacacacattttatctacacgtacaaatattatttgatggtaatgatgaaactttgttaataaaggatggtgaagaaaagttcaggtcaaaaaaatatgaaattgtaggactgattttatctagctttaattctactctgcagtagaaacagaaggcttttttggtaggcagacgccacatttccagcaggacttgtgggacttgaactcaataaaagtttttttttggggggggtgggtggaatgccaataatggtaagaataacaatagcaacaatgatagcaaaggcaataaccaacatcccctaatctgcccctaggaccaggttcagtacctcacatgcattctcactaatcttcacacttacaggaatcttcaaggtagagggtgttaccccgctttacagatgaggaaactaagtcccagaggtggtcaggaactggctcaaattcagacagcaaagtggcagagctgagagtcatgcccaggtggggaaaccccacgcgtgcattctgtcactcggctgaactgcagcacagccctgggcttattttaagaacataaaacctgtctcactagacccaactctctgccctgttccttattctttctcagtgtcaccagaggacacatcagacacagttagccttccccatgtcaactctagatggagaggaatgcccctcgaaggagtctaggctgcctcaggattttactatgggtgggaaaccaatgcatttgtccttgcccttggttaaacggttatctgaagttggcttatattcatcctcttaccatccttaacagcaagcttgccgccaaattccgtcactgattattttgacttgatgaagcgttgctcttgatctacagattcctcggtgtgttgtggactttgatcgcttggccagctgtaatctgccagcttgaacacgattgatcttcatgcaccaggcactcacacctgcccatttggcggggttgcttatgtctttctcacaccttctagcttgttctttcttttctggagatccaacaatcagaaaagcattccgtatttattccttaacttataaggaacctataaatagggctcctgtgtttcttttcttttccccaagactgtgtttgaaggttaatttcaggattttcttggcatccttaaagcggtgggactgttctaaactcctttgaacaaaatgttgattgaagtgttatcttttgtaatatactcctggagggttgtagggatttggaggaaaggtcagagtgatagggagtgttttggaggaggtgagatttgatccagcccttgaaggatggtggggtttgtggtgctagatggctgatgaggtcatttgtagataggtggagaggtgtattagctggttttgcgttgatagaaaggaatacctgaggctggtaatttataaggaagctggctcacagtcatgcaggctgttcatggtgccagcattgctcagcttctcttgaggcctcaggaagcttttacccatgatgggaggtgaggggagccggcgtgtcacgttcctgaaagcatggtgtttttattttttatttatttattttctttacctaattggtaaacaggtgaatgcagttctacttggagactcagcccacccagcacagaacttctcacactgaatgagaaggcgctgaggtgatgtatgtgtaacccaggcagctcgttaacatttaggtcctgattcgatgggtctggagtgacacccactgagacttcgcctttataaccagctcctaggagaggtctgtggtgctggttgttgctccactttcaggaacaaggagctgagtaactcaccacgtgctggaaaacatgcccttttcttcgaataactcagaactagactcccagagcatggccagagccctggcttcacctgggtgtggagtggaaatgcagggtcttgattccaccccagccctgccgaggcagaatctgcacttgaacaggatccccagctgaatcacgtacacacacaagtttgagaagcactgacatggaagaggcaggtctcaagaataccagtaaagccagacgtggcttccagtaatgaaagatacaggtctcaagaacagcagtaaagccagatgtggtttccagtgctcagagactgaaaatcctggcatcaaattaagctaattcgtaagtgggttgaaattaattaatcagaaaggacaaaatacaaaaaaattagccacgcatggtggcacacacctgtaatcccagctacttgggaggctgaggcaagagaatcacttaaaactgggaggcggaggttgcagtgagctgagatcgcaccacttcactccagcctgggtgacagagtgacactctgtctcaccgaaaagaaaagaaaagaaaaaagaaaagtctctctgagtaaaataagagttgtactaggtttggaacaagaaaagatatttataaatgcatttaagatttgtattttcagcatcagttagaacatcttatctatagccatttcttagaaaagtctagttgtaaaagaacagtgatttttgcacatcttgctgaattatttttatttatgtaaataatagcagatggacatgtataatcatttcttttctaaataagtgtgcataaaaatgaagacattggagagcacttctaatccgagagacgttataaggattcagccaaagacaggatccttggggcttcggttcctaaccagaggggcaccccatggacgagcagatcaacccattttaattttttcatgtcttaagtaaaaccagagcttctcaaatgagaaattcacaaccaaacacttaaaagtggtagtacccagaatggaagaaatattctatcagtctggggcattttctttcctcacatattcctaccctaagtgcaaatgttcatacaactatattgatgaacacttcctctgccatggttttagatgatcaatttcttatttgtgtcatctttgagaatgacagactctgaggttcaaaaccttatggggcttctatcctaaccaacatcaaggaactataagtattcaacgtcccaaaacaataaagagtaagtaaacaactgcgtagctaaccaagtccctcctttgttctggaagaataattttgcgggaaatccttgctttctattcaggcatgtggggtacaccctaagctccttaaactccccgccatcttcctcagtgatatttgctcagcatccctaggttgattggtctatgctgtggatttgagctatgctggttaccaaagtgcctagtttttttctctttccctctccgtgccgacttatggggcgttttacttcttatgtatgagtttttccataggttgaacagagaccaagtgaaatttttaaagaaacaaatgacgctctcctattagaagctttgggagaggtttggtagaagtgcctattgtaattgacttgccataattacttttggattttctataaatttgctatacagctgttattcatgctgggcatcaccctgctttaaaacggcatgagttgctgggtgcctgaaccactcttactgttcattggtttggattgatagtttgcacagtccagatttgctgagtaatcattgacctgccacgtttttaataggcccacactgaccagcttggttcttaatatatttgaacaatcacataaatggaattaggacttcattttttattcacctgccttccagtctatgtgaacagactacttatgtttctagcagcagtagctcccccctcactaatgcttgtgataatatgcccgtaagtgagtatcttaggagggatcttagctgtgcttttgtgcacttcactccacacatacagcctccgcctggtgctccctccctctctctgtcgtcaactttagatttattgtcagtgttgattttcaaccaaaatatagatgagattgtgttgacatttaggaaaaaaaccttgcttcgtagcagattgagtagagaaccagttggtttaaatagataaccttgggtcatatcagaaaatgccttgttctagcagagtactctattcttgcaccgtgggactgactttattcatttaaaggaagctggggcagacgggaaaagaaatattttcttctctgaagacttcctgatttgtttgtacctctgttgtgacacccaagggtaagtctgatatagcggtttctaacaaaatgaaaagagatgggaaaacagaagaggaaattcctctccagttgtgaattatcgttcttcactatcaaagcatccctgtgcctggctcgttctgtggccttgttttctctgctcctggtccaaaacaatgacccacccattcccagagatagacaggagagaacaatgtgtacacaaaagagagggacagagagacccccaaaagaagccaacacccacctctgtctcacctgtgtgttcagatagggtgtggccgattgtgctgagcctgattatttacgcttctcagaatcagggctctccactcaggacagtgaatccccaaagaggctgagcccagaacctgccctgggggcagctggtgccaccgtgctggtagacgacacagcccagccaaagccacctggagatgagggtagcacaaatcctctctccatcctccgcatcctccggcgggaaatgctcctggatctttttttttttttttttttttttttgagacaggctggagtacagtggcttgatcatagctcactacagccttgacctcctgggctcaagtgatcctcctgtctcagactcctgagtagctgggactacaggcttgcaccaccactcccagctaatttaaaaaaaatgtttctagatacagagttttaccatgttgccatggctggtctcaaacttctgggctcaagtaatcttcctgcctcagcctcccataatgctgggattacaggtgtgagccgctgcacccagctgatcctggtgttcggacacgggatgctgttccattcctggagctgttttggaatgaacgctatcaaaggatgtggttagcttcagttgtttactgctcctcatcattttggaacattgagtagtctgtcacttgatgttggttaggatagaacccctgcaagattttcttcctcagagttcatgctcctcaaacttgaaataaacaagacactgattatctaaaagcatggcagaggaagtgttcattgatatatttgtataaacctttgcatttaaggtgggaatacgtgagaaaaaaagtgccctatgactgataaaaatatttcttctgttccaggtactactgcctttcagcatttggttgtgaatttctaacttgagaaggtctggttttacttaagatatgaaaaaataaaaaggggggtgacctgttggtccatggagtgccctttgtggttagaaactgaagccctaagaaacctgtctctcaaaaggttggcgcttggttctgtgtgtttttcccatggctaggggaaggtgtggaagagaaagctttctgtttggtgttgttcctgttaagaaagtcttcaaaatgtaacaaacagtcctgggggcattcaccagccgcacggcatccaggcaggcctctttgtaactagacggtgaatttaccttctgcctgaatagcggtaatttctactctgtgagttgaacagtggtatctgtagcaagagaaaataacttcaatttagtcaggttttctaaagatcttccttgtattttaaggaggggccataattgtgaatttcaagatacactttctgaacagactgtgacccccttccctcttatttatctccttttttctttctctcctgtgttcaaaccatttgttaagacaattttctgttttctccagggactggggattgaatgtctttgttcttggtttatctattaaagacacttttctagttacagatactgtttgtgaatcacaggctatgcaaagaacatctgattatcagcggactggagcccagcaaacagtcacaaacatcccagagctttcctgcctttctgaaaatgtgcatgcaaaattcttgacatgaggaagttgtaggaacaggtgttgatgtctatttggaaagtgtaaagttacacttatgcaattttagcaaacatctattaggcacttactgtttgccagatgctctgaagcatgcagggatccacaagtatcacgtgccttccaggaatttgcaaggagtggggccgataagcacgtgtccaaatgcgcaaggctgaaagagatgggctcttgtcctactttccccagaagtagagcctgtgagctcaacaaagatgtacgtgcaatagtgcactgagcggtgaccccagaaagtgtgagtagaggagtgtgcaaaggacacagcatggaaaggcactggtgagctctcatcagtgagcattcatcagtgtggtgagcagcgaggttcagccccgaggcaaccccagggagactgtgcaaagccccttcggtgttgcttacccaaggaggggaggaagcctggatatttatgcatcaactcccctcttgtattggcaagaacaactttgagagcattcttttctgtctgtctgcctcacctttgtaagccggtcatatctctggccacagaatggcctttggtaggaactgatgggtacttgcaaaaagccctgggcctgttggtgaatggtgagtgccagggacgatgggcagggcacaggcagcacctgccacaaagccatattaacagagtgtagcaggtgcaccccacacctgacaccgtgtacaaagcttaatgcaaaatgggtcaaaaacctaaatgtgagacctagaactataaaactcctagaagaaaactttatgacattagatttaggaatgatattgataacactaaaagcacaggcaacaaaagaaaaaatcaaaattgaaaactcttctgtatcaaaggacactgtcaacagagtgaaaaggcaacctgtggaatgggaggaagtatttgcaaatcacatatataataagggattaaaatcgagactatacacagaattcctacaactcaacaacagaaaaaataagctgatttaaaaatgggcaaagaactggaataggcatttctccaaagaagagatacaaatgactggtaagcacatgaaaaaatactcaacatcactaatcatgagggaaatgcaaattaaaaccacaatgaaagaccaccccactccctttaggatggctgtaattcaaaacagaaaacacaacaaaaacagaaagtaacaagtgttggcaaggatgtggagaaactggaacgcttaggtactgctaggagaaatgtatgacgaagtagcctttggaaaacagcatggtagttcctccaaaaattaaacgtcaggttaccgtatggtctagcaattccacttctggatatatacccaaaagagctgaaagcagagagttgaacagatgtttgtatgcctgtttatagcagcactattcatgctaattagaaggtgagaacaatccaagtgttcatggacacatcagtggataaactcaatagagtccacccacacagtggaatacgattcattcttgaaaaggaaggacattctgacacatgctgtatcaatgaaccttggggatgttatggtaagtgaattaaggcagtcagcagaagacaaatactttgtgattccacttccatgagttatctagaatcaagttcacagagacagaaagtaggatggtgggtgccaggggctggggaggaggaagtggggagtgagtgtttaatggggtgcagagtttcagtttgggaaaataaaagtgttttgggccgggcacggtggctcacgcctgtaatcccagcactttgggaggccgaggcaggcggatcacaaggtcaggagatcgagaacatcctggctaacacggtgaaaccccatctgtactaaaaatagaaaaaaaaaattagccaggcatggtggcaggtgcctatagtcccagctactcgggaggctgaggcaggagaaacacgtgaacccgtgaggtggaggttgcaatgaccctagatcacgccacagcactccagcctgtgtgacagagcaagactccatctcaaaaaaaaaaaaaaattttggagatgtatagtggtgatggctacatcacagcttgagcgtccttaacgccaatgaactgttcacttagaaatggttaaggtggtattttatgttttgtgtatttaaccccaatggggggaaaaaaagaagtataccaaagtacaaagaggaaaggccactttaatcaagggtactgggaagcctgcctggaggaggcgctgtgtcctctgggccctgctggatgggtgggatttcaggaggcagcagtaggggtggggacgagttaggaatggagagagctgttacaggtggggacactcaggtccgaggagggcagaggggaatgtttcagagaatgccacacggtcaggtgtagccgaagctcaggaatgttggaactcggagaggctgtgaaagagaagccctggctgcctggccatgatcatcatgtgcctggtcttgactggcatgtcaagaatactgtccgtgcagtggcgtgtgccccaggagcacggcagttctcaacaagactgcaccgagatctggagatgaaacttctcagctctcttacatttggccatgcggaggtctacccaggaaggacagccttgtcccaaggacctcactctgttcactcaacaggtatttatgaggcccctatgacatgtcaggcattgttctaggccctgggaatgtgggcagaacagggcagatgaaaatgcctgtgctcatggtcatgcgttccagtgggggagagacagacatgaacaaaaccagcacaagtcattcttcagatggagctgagaaccacggggaagaccaaaggccatgcggcagaaccacccagcctgcagaggcgggatcatcagggcagtgtcctcaccgctcttcttaaacactgggcttaacaggaggcttttgtggacattaaaaacaaaatcgcaggtccgtttggatccctccattccaaggtttaaacacaatggtgttcgctggacggatctaagaatcttagccactctgcctagcagcctctcaatgttttgtgtctctcgtttcaactttgaaaagagctttgtgccagggagctcctgcagtttgggtcgaggaggaccaaggcttcaaaggcccctgcccgcgcgtcctgcaggttcccattgtccgtgttaatagcctcagatgggcatcagttgccctgatgggcttgggctccacgcccgggcttgcatgtttggcaaaattactcaagagcatttcttttttttttctttgagacagagtctcactctgtcgcccagactggagtgcagtgacgtaatctcggctcactgcaacctccgcctcccatgttcaagcagttctcctgtctcagccttctgagtaactgggattacaggcacctaccaccacgcccggctaattttgtatatttagtagaaacgggatttcaccatgttgcccacactggtcttgaactcctgacctcaggcgatccacctgccttgacctcccaaagtgctgggattacaggcataagctaccgcacctggcttccaggccatttcttatcacagctaaaagtgatctgttacgtggctggttacattctcagcaactttagaattctattcagaagtggacctaatcttgagacaaataccctcttaccccttggtccactgaaaagacttatgatcccagtctttctattggtgatggttcttctattcagtgggagattatgcatttatgtgtttggatagaaattagatcctcagcctggcacggtggctcatgcctgtaatcccagcactttgggaggccgaggcgggaggatcacaaggtcaggagatcgtgactaacctggcgaacacggtgaaaccctgtctctactaaaaatacaaaaacaaaattagccgggcgtggtggcaggcaccagtagtcccagctacttgggaggctgaggcaggagaatggcgtgaacctgggaggcggagcttgcagtgagccaagatcgcgacactgcactccagcctgggcgacagagtgagactccgtctcaaaaaaaaaaaaaaagagatcctcagctgttgtttcttgaatcagatatttggatcactctagcatccaatcatgcagctcctaaatatgctcctaaatcatgcaggtccaatcacgcacctgttttacggtttatcaatttgtgctcatcctgaactaaataaacaaatccatgagccaactgcagcactgtcttttatcaccttcgtttttctctgcccagtaaaaagctgaagaagatacattctttgttaccttccattcatttccaaatgtgtaacttttcaaatatgttataaatgagaagaaaagaaactgctggattgtcaaactgtcattttatttatcgtctctcgtcagtagaaaagtccagaagcagtgcgttgagatgaaaatgaaggtgcgtgaaagagagaattggaaatgggatatacgaccgtatttcctctctttccctttccctccctcctgctgggcaggaaacgagaagaacctagtcagcggggaatacctgtctccagggaattttttgggattagatcttttggggttgggtttgtgagggggcctgccctgtccccacacatgtgattcctctcactgcacaatcctgatgcctttggcattcgtgattgccttctggatgatgaactataaaggaggcagctcttaaaagaatagaaaatgtcttccagacacaacaaaatatacactcagaaatgtataaaccagcttcccacgtccaggggctgggccagtacagattaagaaggtgaacgtgtggaaggtaaagggtgggaggaattttctatttcgtgaacttgtttttttcttgttagaaaggaaatcacagtgtatttcagtttccacaataaagtgcatctcagaattgcccaggttctgccacaagagacttacctcttggtgggctggggatgacctggatctccctgctgcctgcacgtctttcactttggacattttaagaaaaaaataataatgtatctgggttcttggagatatatacatatatatgtgtatgtatatctgagtctctttaaaaataggtatcccgggagcagagccacagcctgagctatccagatgcctgctccccttggtggaaagagatccgacacacctgttgctctgagatgcttttgcagacaggaaagctcttaattcctttgctaggccattttaacaatgcagagaaaggtgacagtcttcacgtagtcccaaaggcaattaataagcaaaaaacttacctgattttaagtgaagtgtcacggagctgtcttcacccagcccatgaaaaaccaccagtgcaccttgagacgcgtaggcaatgttcaaggccaggaaagactcaccagttcctgtgcttcccattgtcagaaagcaggtggaggatggccggagccaccctggctgcagaaactgacctacagaacttctcattgtcagaaagcaggtggaggatggccggagccaccctggctgcagaaactgacctacagaacttctcattgtcagaaagcaggtggaggatggccggagccaccctggctgcagaaactgacctacagaactgaacagaatagtgattcaagttggatatttagaatatctaaacgtgctttgcgggacagtgaaaccctgcttggtggaggtcaggacttctgcttctgtatagctctgcattccttagccaccgtcctgcaaggcaaacgcgaaaacgcatcttaaaactcgagcagaagtagccttggttgtatgcctgaaaatgcctgttcgtttggaaaaagacaatagcttcccgttttatggcatcttcttcttccttcccagccctggccatcgttctcactgtcctcagcggactccctgggcctcctctttaaaggtcagtgctgaccgggtgtggtggctcacgcctgtaatcccagcactttgggaggctgaggcactttgggagaccagcctgggcaacacgatgaaaccccgtctactaaaaatacaaaaaatagccgggtgtcgtggcaggcgcctgtaatcccagctactccggaggctgaggcagaagaatcacttgaacctgggaggtggaggttgcagtgagccgagatcatgccgctgcactccagcctgggtgacaaaaataataataataatagtaaattaattaaaaaaataaaggtcagtgctccctggcttctctgcaggccatctcctgtgctcactcctcacactctcatggagtggcctcttgatctcctactttcaatcaccgcccatgtaccccctgaacctgcgcacctgggtaccccgcaggcacgtcttaggaagcttgggcagcttctgcagaacgccttcccttctccctcctgacccaccagcactgccactcccagacccccgtctgtctcctgagctttctcccttataagctgcccagccacccaccaagcagctcaagcgagaaacctggagagaagcaaggggtcttaggtgcctctgtccctctctcctctccctttgtccccttctgtcatactcacccccgtctttcttcctcctcttagcaacacccttgacccattggactttgcagccttttcccaaaccgtgtggtaggctttggttgtggctccctgaccgtgctcccacccgctctagacagtgtgcaagcctggccatggctttcctccttgacgcccttggctgcctctccattccctgatggatcaagtccacactcctgagtgtggcgctcctgcctcctccgtggccagctgtggccacgcccatgcccccccactgcccctcaaccaccaagaactgcttcctttttcccaaatgggccaaacgggttccctccttttctcctattcctgaaatgcctttccttccattgtctgactgggggatgcctatccatcttccctgctcaaacctttcccaatttctcctggaagaactgacctcaacgccacacccacactccacggcctgccatctcccttctctttggctttcgtagctccgccacaatgtgcttgctctgttcatgtggctgccatcctccaccaaactcgaacctctttgacgaagtggacgttaggcagttcaactttgtatccccagcacctgccaccatgctcctgaaataagaggcagttgttacagttgcagtcatcctgtagcaatcgtgatctgctggtgataaccagccgtggtatatttggacaagacttcattctttttttttttttttttttgagacacagtcttgctctgtcgcccaagctggagtgcagtggcgtgatcttggctcacctcaagctccgcctcccaggttcatgccattctcctgcctcagcctcccgtagctgggactacaggcgcccgccaccatgcccagctaattttttgtatttttagtggagacggggtttcaccgtgttagctaggatggtctcgatctcctgacctcatgatccgcccacccaagcctcccaaagtgctgggattacaggcgtgagccactgcacccggccaagacttcagtcttctctcagcaagtgcttatagtcagactgttgtcatttaggcactttgctgggtacagagataaataagacatgcgtccctccttatttcacatggaccagcccaccagcaggtaatgactctgcagagacggggcagtgtcagaggagcaggggtccccaaggcagcagcttgagagggatcccttcatcttctctccagataaccagttggcaaaattctaaagcatttttctaactgttatcttatctggacaacacgatcaaaaaatactatgataggatgttggaaaaagatttaaaagaagccaaagaacatattgctcaacattgagcttttaaaatagggtctttttccgtgtgtgtgtgtgttttaaaaaaatgttttctcttgtttctacaagttttagaccaattatttttggagcaggaagatactgagttttcagatggtcctgtagacccccttacctgctggttttttggtggaatcctgtttctacaaaaagaaaaccccatagatgtagacacactaaaaaggaaaaccctggagattgtttttaatcttagaatttgtggcacttgtactacggtttttctcgtaacaaagccgcttctcgttggaaatgtctatttatgtggttcatgttgcccatgtccacttggaggttatgcctgagtctcatggctcagggagaatatgactcagcatcttttggttgagggcagctttgacctcattgttttctggtgtggcacagggagcagcctggccacgtgcggggaacggcccatggcctgtccctgttcgagctggctgctgcgaaagtttcaagaggcgtattcgccaggagcactcggctgtgaatccagacacggaagacagtggttttaatagagtaaaccaaaatgtaggatttgctctctccgatattctggaaaatcccactgctttagggcatagacttttcctgaaaatagaaggctgtgttttttaatgaggtgctgagatctttgtaacaaaagtgggggagcaactgtgctcagagccctgagggcaggatgttccctctgagctgtggccggacttcccgccttcccaccaggctcaaggttcagcagccaccttggcctctgcctccccgtcccctcccttctttccccttctccccccacttcctcctcctccgtcctccccatttgtgcttcagggtcttgcatattctggtctccctgcctggaaagctgtgtgcccagctgcctacagggctgcttcctttcctctcctccttcagagcggagtccatttcccccaccccacccctgcctcctggttgtgttcctagcgcggaggctccctgaccagctcttgctcattcgaccgctccccaacccggcgcacggtgcggggctgccgtggaaggggcgttttccattcatccgactttatttgcagtgactccacagcttagcagttcgggttaactttgaactttattttttttctgtttcagagacttgatattctttaaatgtactttttaattaaatgcgacctagacagcttctccctcctcagcctcttctatgagtaaagaggttcatgtgggggaaattgactaggattaggcttcatttccctctgctgcgtgttctttattcctgtaactacaaagaggcgtcatctgaagtgtttgcctttctgcctctgaagctacctggcgcccgttggttgctgacttctgcagaaatcctcctttgactcagtgtcttcacctccagccacctaaaaccagcctgggaaacgttcagttgagaacactactgtaaagtctcaattaaggaagtgcttgagggaaggagtgttctagttaatttttgcttaacagagcacaaccagtgtttttgttaggaggaggcagcattatgtaaaagaaagattatcaactttggatgaagacattccatgatttaaagcttttctctatcacttgaaaccatgtgacttagggcctcaattttctcatctgtaaaagagggataacaatcgttatcttactgggttgtcactatattaaatgggcaacatgtgtaaatcatttaccaagatgttttgtggctgcatggcagcttggcaaaatagaattcctttctctacttttgttttcgttcttggaactgaggccttattcgttggtatatggcattttaaaaatgttttgttaatgtaggacgttgaagtagaaggtaatagtagcggtggctcttaattttagaatctttatgataaattaatcattgagtatttgatgagtgtttattatatctcagatatgcaaataatagaaataaagaggttgtttcattcttttaaaaatgcttagatattctttgcatcttctaaaaattgaacttggaaaaccttttggtagaaaagccatcatggcaggtaaaaaatgtcgaagtccatctgttgacctcttcttgcttacaaaaggagcaaaaaacccactcaaaagcagtaaaagaggaagagacgtaggtccacaatgacaaaaagaaagggagaggagccagtaccgatgaaggatgagaacaaacacccagaaagcaaatctcagagggaggcatcacaaccacctggggagagggcctgagcctgaggacacttggggcagacttggtcatggaggggctggttatgacagagagctattagctactagcatggagggggagccattgctagtttgtataaagaacagtctatgttgtaatcccagctactcaggaggctgaggcaggagaatcacttgagcttcggaggcagagtttgcagtgagctgagattgtgccactgcactccagcctgggtgacaaagtgagactctgtctcaaaaacaaacaacaaaaacagtctacttgtaacccctcaaactgtaagcagaatacttaagctagattaaaaaggtagatgaacagacaaacagaaagttatagataatgaacagccccagagaaaagacatccacactctgggatttagcgtcccttcggaataatagtgagtgtttcactttattaaagtgaagtcgtcagttgacatctcctggttcattcatatgtataaaaggacacagggatcatttgaagaaagcccttcctgtaaaaggtatatcaaattaacaaagagggagaaaaaagatcccagaggaacacaaaacagaacttcagaaagtatttatactctccgagacatttagaaatgtatttcacccatgaaacaagaacaggatgcaatgaaaaatgaacagaggacaaaaagttagtcttgggagtcacaatatggttactgaaaataaacatccaaaagaccagttagaagataaagttgagggccgggcttggtggctcacgcctgtaatcccagcacttcgggaggccaaggcaggcggatcacaaacgaggtcaggagatcgagaccatcctggctaacatggtgaaaccctgtctctactaaaaatacaaaaaataagccaggcgtgatggcaggagcccgtaatcccagctacccaggaggctgaggcaggagaatggtgtgaacctggggagcggagcttgcagtgacctgagatcgtgccactgcactccagcctgggcaacagagcaagactctgtctgtaaaaaaaaaaaaaaaaaaaaaaaaaaaaaaaaaagataaagtttgaggtgctctttccaaaattaaaaaaaggaaaatattggaaaaaagtaagaagcatgttgaatcaatccagagtcctaaaatccaaccaataagagccctagaaagaaaaacacagaaaacagaggggagaaaattatgaaggaactaacgctatcaggtatgcatgtctagagtgaaaggacctttcagttacctagcacaatgtataaacccccctacacttagacacgttttattttatttatttttttgagacagggtcttgctctgttgcccaggctggagtgcagtggtgtgatcatagctcactgcagcctcaacctcctgggctcaagtgatcctcctgcctcagcctcccaagtagatgggaccacaggcacagaccactaaacctggctaataaaaaaattatttttgtagacatggggtttcactatgttgcccaggctggtctcaaactcctgaattgaagtgatcctcccacctcagcgtcctgagtagctgggactacatgtgtgtgccaccacacctgctaattttttttttttcttggatagagacagggttttgccatattgcctaggctcatctcaaactcttgggctcaagagagccactcaccttggcctcccaaagttctgggattacagatgtaagccactaagcctggccaaaaatcattttttacctcattcaagaactttgaagacttactttttttaagttatttaaggatactctagctaagtgaggacatatgccaagaataaggagacagtgaggtccagggaacggcaggtgttacccaagaatgcagcggaggagagtctcagagtgacgagtccacaccaaacaggaaagggaatgtctctgtgtttaaagggagctgggtagattgccttcatgtgggtaaaagagaacagtacaaaaggctataaacagaatgcagccatttttgccactcacaccagaggcgtgcttttctctatttagccctttgtgctaatatttaactccgtgtcttaacaatatgtgtctattgctagttcttgatttgccaattttagacgttacctattgaccttctgctgtgatggatgagctttttacctcatgcctcttcacacatccttctcaaaatatagtccaaacagtatgtgtaggccttttgttatttaccattgtaactctaagatatatacatgagcatgcatgcatgcacacacacacacacgcttctttatttcttgtaaactggaaacagtagcttttcactccctgttgtgtaatgagaagccaccctcacccccaattctcttctgctcttccacctcactccgtcttctgcagtttcatatcgtccaggttaaaaacatttaaattctgtttcctaggcacaattacatctggcattttagactatggattaattctaaagttgaaataaatatacactgtttatatttactatgtaaagattatctactgcacagctagacagtatagagagattatatttctttcttctacagatttttttcaccgggatttctaattgcctttccttttaaaaagaagtatttgcttgtgtgtgtgtgtgtgtgtgtgtgtgtgtgtgtgtgtgtatttttttgtaaacatggggtttcactatgtatatcttttaaaaatacatatatatctatatgtgtatctatatctgttgcttaaaaatatctgtatctatatatctttttaaaatatacacatatatatttatatatatttaaattacacaggtaaataacagaagaagtaaaaatcctgtttgaaagtatcatgaagtggtgtgagctaaaagctcatctgttgtagcagaaagtcaatagataatgtctaaaattggctaaaaacaagacatagcaatagatgcctataatttaaagacatggagctcaaaactaagataaaacactaacagatttaggggagattgccttagggagagggggtatggttttgtttcattttaagcctctctgtaatgttctttttaatttatgtgcacatatgaatttgattgaaatttaaaacaattttttaaaggaagaaaatataccaggatcatgtactacaatgagcactatccttgctattgaaatatctggattcaggtcacgtaatattctactgaaatgtttttgtgcagtctcaacagaaaatgcatagctttgccatcagaagacctatataaccttgaccttgttgtggtggtttccataagtcagattcaccttgcaggtgaccttgtgtgtgtatcaccattgcttttttttttttttttttttttttgagacggagtctcgctctgtcacccaggctggactgcagtgatgccatctcggctcactgcaacctccacctctcgggttccagcgattctcctgcctcagtctcccgagtagctgggactacaagcatgtgccaccacacccagctaatttgtttttttgtatttttagtagagatggggtttcaccgtgttagccaggatggtctcgatctcctgacctcgtgatccacccgtctcggcctcccaaagtgctgggatgacaggcgtgagccaccgcgcccggccaccactgttcttttaaggctgtaggtgaatcaacacgaaggagggcttcctcctcctgtggtggagctgaaccccgtgatggatggatgtgtgcggtgcctgcggcacttggccctgcggggctgcgaactcagccttggggctcatctgtccacagcacagccccttggagtctgccaggagctgagcccccaccagtctggggaggagggactcagtggcccaaggaccattctcctcaggcgtcctccccagtcctgaactcaggcttcctcatctgccaccgtggctgagcagtgattaatgccaaattagcaccctgttcaatgacctttcagcattagccactgcctcccttcacttcacataactatttgcaaatattagcttctccggccgtttctcctcatcagccactttcacagatgacaggcaggccgttagtctgattggcattccattcctgtcctttgccccatcgtgagtgcatccggactctgccatcttctcagaaatctgataaccagcccaggaatgttggcaattttacaaagcgaaggcgtcagcaggaaggtttccggagaagcttcgagggtccgctgcagagttggagagtctagagatggggaaggctgcctcagccccccagggacccagggctgggtgagagtcaccctcacattattcaatcaacatatagattttaaaacattcattacttggctctgtctgcatcaggcttctgtttttcttttagaattcacatgcacgtttaatacaaaaatctcatactgcttaggcagtgcaaggcagagcacagagctgtgggaaatcagagctgatgagaagcccgtcgtctctttcccgttgttctctctccgcggccctcaccccaccgccagccgggcaggctagaacctttcagttgccagaatcctccgctgccgctcacgatggtggcgagtcccttcagcgtgaagcccagatgaagcgttttgcgtttgcagtcatttccatttatttttatttccagcctcttacatctccgccctttattgaaatccctgttctagaaatgttggattggtcttcattttctctaaataaacagtagtaaagtgtactgtgggtagtttaattttgatgttaaatgtattttagagaaaagcggcaaaaaatatgtcctatttttttctcccttgtcaccagaagtacgagataaattatttatagtttgatactcaaaaaacatagattcaggatatttacttttcagaaaggaaaaaaggattgaaactgcagtaacagaactgaaccctttgttaattgaatatattggctccagggaagcatatttggacaggagtaagaatgcccactgctttccagtgacacccatgcctaacgtagtggctgatacatgaaatatttgtggaattgaacagatttggaaatagcaggtagactaggtaactcagtaagcaaactcttaaatcaataaaagaaaaataaagccagcaagcattttggaaaatgccaaacagtttaaataaagcccctcagccacacaacacacagagcagtagcgtaaggcccggtaaccatgcccggtaggacaggctgtggattgtgcctgaggacactggctgtgcttggaccccatctcatgtggtctgagaaaggccagggacagtgaccctgccccagggcttctcatgggagttcaggtaggggccatgaaatttgggtttcctattagcgtgactctgacaatagtcttcatttgtcatgctccgatcatcccatcttctatctgccctttcactttctgtggtttccattaccctccgtcaaccatggtccgaaaataggagagtacagcacagtaagatattttgagagatagagagggaccacattcgcataactttcattacattatgttatcattgttctgtttcattattagttgtagtcagtctcttagtgtgcctgatttacacatttatgacaggtgtgtatgcagagggagaaagtttgaacagatgcccttccactcacaatggggttatgttccaataaacccaccggaagttgaaaatatcggaagtcaaaacgcgcttttgtagccccgttgtaagttgaggactggactgaatgtgtatggcttttgcaccatcataaagttgaaaagccctgcgtggagccatcatacatcagggacaatttgtgtctgtagggattggtactctctttggttttaggtatccccgggggtcttggaacgtgtcccctcagataacggcggggggtgctcctgtacttagagtttcatggacatttctcttttctctgccacaggagatgttggcacacctgaaaccatggccccaaccattgtggttcccccgggcaacagaagtgtggtggctggatccagtgagaccaccttggaatgtatagccagtgccaggtacgaggcgcgtctcctgtgagactcctagtaaatattccatgacctgtgacgagccgacgatagaaggatacactggagcatgaggttcagccttctagcgacagtggtcttgtttggccgggtgggccatgaatacgagatatgggtagataaggaaatggacacactgatgtcttccagagtcccccactgcaacagggcggtgctttcaatgcagctctgggtggtagtggggggctcctctgagatcctctctagggaagagagaggagttgaggcagaggaaaaagttcattgctcttctcctcttagtcagccaaggtgttctctgcctacttagcggtcgctccagaatcaagctcggatgatcccgccttccatgtcgttgtgtcccctcacagtatttattttaaacattcatttcctgagcaaatgggatcattagcacttatggtccattgctgcggcaattagatatccttgcttaatagcccttgagcagaatgcatcgtcaatgcgtgctgggagggagtagagttacatctagattgagttttcagtgtccgttgttcaacccaccatgcaccctggtagcattagcttcgtcaagcctgtgccgagtgcctgagatgatgaccgttgccacctccctgagtcacaatcgtcgtcatgaatgcctttcattcccacaggcctgtggaggacctgagtgtgacctggaagaggaatggagtgagaatcaccagtggcctccacagctttggaagacgcctcaccatcagcaacccgacgtccgcggacaccgggccatacgtctgcgaggcggcgctgccggggagcgcttttgaaccggccagggcgacggcctttcttttcatcataggtaatgcgggagcctctaagtggtgttgccagcatctcagatagcatccgacactgactcttctgcagaaacaaaatagcgtatttcagtggctttatttgtaactcggcaaatgaaggtgaggttgagtttaccttcgaaatccttcctagccttctttcccaagaatataagtccattaaatccaaagtgttgatgttctcaatccttccaagaaacgtccttctgaatactccagtcacaaagctcgggaaatagagcggtgaaacccctgtcatatagatccctctcctattctagctttaggctgctaagcttttctgtaactcttatttggctatcgtgatcggtgttcagaaactattctattattgctgtccaggcatggtggcttatgcctgtaatcccagcactttgggaggccaaggtgggcggatcacttgaggccaggagttcgagaccagcctggccaacatggtgaaatcccgcccgtctctactaaaaatacaaacatcagctgggcgcagtggcgggcgcctatgatcccagccactcgggaggcggaggcacgagaatcacttgaacccaggaggcagaggttgcagtgagccaagatcgcatcattgcaacccaatctgggccacaggagcaaaactccaactcaaaaaaaaaattattaatttagaaattattctattaattattaatttagctgttattttttgacctagcagaaaatgtaaaactatcggatgttaccttttgttaaacttaaaaaaaaaaagagaacagagatgcttcctcaaactgggcgacatattattcctgaaccaaggagaaagaacataaaattaagtacactggagttgcccagctctaaatgctggaaactattagtgtttagggagtgtgcattgtacagtggctaagaaaatacaaaacctattatcagtttatgaggaggttaagttgtgaggcaagtgactttatttctctcatttttccagctactgtcatgcatttattcttcataagtggccgtgatgactatgagagcagcctgtgttccgcagtggtagccgctgttgataagaggtagccttagaggccgcctctaggaaggagaatctcgacttcctctctcctctttgggaaaaaggggaattgagaacaggaaaattcaaataagaaaaccctcagagagccccttaaataaaaaaatttgcagtctgccactttgcaaaataaggaaaaaaaaaaaaaagcttgtgttttcctatgaaactagcaagaaaaggaatactgcacaaaaggtggtttaccttgatcacgtcccattcctttaatcattaggaaatgactccatgtcctgaccttgactcttctaaatacaatgcagtgcaaacctgtcggtccctctgaaagaagcgaaagtctgttaaaagcatccaaggaagccggctttgagtcaccaatcactgttgattctacatgagaggcctgagctggtattgctaccttccccatccatgcttccgctacagatgtaaatatcacatcccattctctgcaaagattttttcatcgaggttgatctgtagttctaggagcacagcacattatagattcagccaaaattaaaatttgcgacgtgtaaatctctagtagacaggactataccgtgttcaaacattttaaggtaatttaaacaagagaagaaatttatctccctttaaacgagaatgtttgtttcgatcatcattcctttttaaaatatttaaatctatcttaagagctttagttttacatttatatctgattagttttgtgttctctcgagttagcacctctccgtgttctgacttttaaaggtacacaaacacacttcacttctttatgatgttgagttaaatccccttttattcataagaatttgctgtagcaggtaggatttttgtggttggcgcacactgcaaaaaccctgaagagagtgtctgtgtcaattccgagggatttggatgagattataatcccacgccctgtggccgagcattattggtttcacagggctgtcaccatgtacctgtcaaaagggccacccgtaggagcacacaggccaaagacagagaaacaaatgggctcctattacttgtattttatactgatgacacaggacaggctagttgggctgtttgcccacctgcctgtctatgttgcttaatttctgtggcttgaatgagagcacagaggtcggcttccaggcaccaccccgccactggctgcccagtcctgtggagcagcccctctacgccctccaccctcccctcctgcctcccctctacaccctcctctcccgcatcacctctacactctacagcctcccctcctgcctcccctctacaccctcccctcccctcctgcctcccctctacaccctcccctcccctcctgcctcccctctacaccctcccctcctgcctcccctctacaccctccaccctcccctcctgcctcccctctacaccctcccctcccctcctgcctcccctctacgccctccaccctcccccctcccctcctgcttctcctctacaccctcctctcccctcccacctcccctttacaacctcccctcaacaccctcccttcccgcctcccctctatactctccgccctccgttcccacctcccctctacaccttcccctctggcctcccctctacaccctccgcttccgtcccacctcccttctacaccctctacactgcaccattcatgggcttgaatgagtgttggcctcagtttccacatccataaaatggagatggatgtagatggtaccagctcatattgtgaaggttaaatgcaaaaatgtctgtcacagaggctctgaaatagtggctttagttgctgttggcataactctattatcctatatgtcccattgcactcgctatttaccaataatcagttatgtgacacacatttttcatgtttagtgtctctggaatcaggatgtgcctcaccacctatgaaaccattttttttttccttggggtaagacaaggatgccccttacctctgactgcagcaccttagtgcctgtgagatgcatcttccctccgagccacgccttctccacggtctcctcatcacacacgaagccagctgctcccacatgtgccctgctcctgctgagcacgatggctcggaaactcggacggcgagttttcactgggatggactctttacctggtggggcatctgctgccagccccttcaagttgttcatggaattcagtgcttgtggcttgggggctggctcctggccaggggtcccctcaggttccagagtcccctgcatccctggctcatctccagagccagcagctgcggctgagttcttgtcacacatggaagctctctgctgtcccctgtgcctccagctgcagaaagtcctctccttttaggggctcacatgattaaattgggcccacccagcgaatccaagagagtctccctattttaaggtgggatacctaatcccacctgcagagtccctcttgccaagtgagacagcatattcatagattccagaggtgtgggtgtggacacctccgggagccgttctgtccacctcggtggactagcgtgcagtgcaggccagccgagggcatgcgtgggacatgctgctccctgagaggggcgacctggaaggaacagggaggcagcgcaggaaacatctttggatcttgcagtgatccctacacagaagaagctttgcaactcagaagccaaatcccagcagcattggggatgggagagcaggaaaaatgcatggtgttgttggggggtccttctccactgcggttgcctccattgggcctgagcctgcactttgtcacactggcattttggagagtgaggtcatttgacagaggcccttggtttgggggcagtctgggaggtctccccacctcctctcctgagactggggagctagaagcttgcgctgcccctggaggcagctgccatgggctctgggccatgtggaaggcggaaaatctgagctggccttttcctaacaccctgacttcacacagggcatgagaacctttccctgatgtcttcatattgtttcaaaagagggagaagtgtttgtttccatcccctgttttgttggctgcagtcaggatcaattttcagaagtccagggtggacccatgttggcagagtaccctttctagacacagttgccactgacaggctaagacatgccctcgccctcttgccctctgaagagtaagtggttgagagtctatgcacaggatgactcatttacaatgggttttccccagtgtttaactcacgggcttttcacggtccataggcttggcatttcctccggttctttgccttagagcagactgtgtgtaaaaccgtagctggaaatggggagaaactccatctgagcagccgctgggttagaatactaggaagggttggcagggagagaactcgtaccctcacacggtggggaagtactaagggaagctcagaggccacgcagggcatgggcagctctgcacctgctccccaggcacagcgacctggaaggctttccagaacaagctaagagcatccacaatgaacagccagatgttttccacccatgcctagcactgagctactaaaactgcccaggacattggcccctgcaggcggtggcaggctgccccccagaccttgcccatgccacagtactatggagagtgtggagtgggatgagttttctcaccaggtggcatgctgtgtgccaaacacagatggtccctggctagggtggagagaggtcaccacttggagaggagcagcatcgtctgggcctggaggtccccagagccatgcacttgctcagccaagccagcttcgggtcactgtgtggagtgcccgtctccctgaccccagcgaggtcccttcctggcactcgagggaagcctcgggggactgtaccaggcgacaacggtaatcagtacctcagggaaggcaccctgggcccgtaggtgccgaccattgttatctatggattttgtatcatcaaagcacaggtcatcttgggtgaatctcaagggaaccatgaagagtgaaaaaaatagttgcaaaagttacactcgatgacctcctttctgtaacgttcttgaaatgacaaacctacagaaacagagaacggattagtggttgtgaggggtgggggtttggggtgctcctggtcatggaaggcaacacccttgtgctgatggacacgtggacctacacacgtaataatgttgcatgggacgtgcatgtgccgtcttttcacgcacacttgagcgcaggaaacactggcaagagctggataaattaggttgattgtatcagtagcagtatcctgatcatgatgttatgctatcgttttttgcaagatgttaccattgcgggaagccgagtgaagggtccatgagctctttcagtgttacagtgttacttctcacaactgcacggactcgacagttttctaaaaagaaaacgctcaactaagaagaggaaaactataattaatcataagcaaatgttgttgtcgaatgtatgtttttttcctttttccttccatgcttttaatcagatcatgacggtagatattgacttagcttccctgatgaatacaggtcaggacctgcacacaagggccctgacagcaggcagctactgtatgtatagttggaatataaataatactgccttcatgattattgattgaggaaacgtgatcaaatgggggatgtatgagttgtgcaatgaagatgagcttgaaaaaggtagacattaaatgctggcaatatttcttcaggcttggtctgtacacatgaaaacttaagtagaggaatctgcttccttctaatgaatttgcagccatctcctcagccggagtggttgattcaggcagattctttctgcttgagtggtccaggtaatcgcagaagtgaaacatcactttgcctccttccagaaaccttcagccgcttcccccttaatcgtttctttgaaatgcttagttttcatttctctttttcatcttttaggtcccaccttgttttaaagatacagtcaatataggaggcatgccaagctatcttatccacattcaacacaattataatgaaagtaaaccagctctggaagacagttcccagaaattaattatcgcacagaaagtgaacacaacagccttttgttatcatgataatgaaatcaccaccaccttaatacttgacaaacttggccatgcctctgttgaatttctgctgaataaactggaaaaatgttgcaattggctctccaaggaaattcattgtttaatacaaccactgtttttttttctgcggaacgggcgagtggagtatcgagagattgcaagtgcctaggagtttcctttgctactaaagatagatgagtgctcccttatatgttttctcttagttattatttggtattccattgaagtattaaatctctattttggagaagaactgctaagaattttaaaaatatgttaataggctgttgcccaatacaggctgcacaccttcctcgggcacttgacaagcttcacgagctcgtgtttagtttagatactgaagcaaactagcccataaaatacggtgctgtaaatataaacctttacgaacctcttggggtagtccttctaaaatgtaaattaagatattccatgattcaagcccataaactgaaaagtagccatcaccctgagtagtaagttgctttctgaaaccccagactgtaaattgcctttggcctgtgctcactgagttctgagtttgtatgcacgatgctaactaatgatgaaattttcaagaatggtttttaagaggagcccacactatcttaggttatatggtctctgacatatccttctttggcttaggggcttttttttattttcttgtttgaagagccaccatattttactgctgagcccgagagtcggatttcagctgaagtagaagaaactgtggacatcggatgtcaagccatgggtgagtgcagagtggctgctggacaaggagccatgactgggaggaagggaaacaacctttttccatagcagaattgccatcattctagggagacattgagtgtgatggcgaagagcagacttcagagagtagatcggtcttggggcagtgactgtgggtaaggcatttgactttgccaagcttttgcttcctcccctgcgaaacagagatgatactatttacccagcagagcaaaaaggaagcccacatctaccccagacagagaggggactccatcatatcctgtggactccccttccaaggccctgacttcacaagtgtgtgaccccccgagattcggggcagaaaattctttctcatccatggggtgactaggactggtgagcacagccactctagaaagggagatgggtgtacatgtatttgtagtaggtacgtgaggtacaaggcaattttgttccactgatgtattgcacagtggtgaagccaaagctgggagtgcgtccgtcactggagtgatgtaccctgtacccgttaagtaatttctcatcgcccaccccacacccttgtgagtccccattgtctgtccttccacactctgcatccatgtgcacatgtgacttagcacccacttattagtgagaacaggcagtctttgtctttctgtgtctgagttctctcacataactcagtggcctccggtgccatccaggttgctgcaaaagacacccttttattcttttttgtggccgaatagtatttgaataggaaatgttacctttttttttttgccttttcagctctgggtccccttttcctttgccattcaggtcatcccagccctcatccccatgcttcaattacaagctgcccactgtcaccgtctcatgtcgggcagcacaggtgattacacaaaaccttctagcagagacaggcttgtcaaggcagtttcgttaagaaaagctgtgtttgtattctggcaactatcaggaaacgaaaaggatcttttctcttttgtttatacccatccgtcctaaggatagtattttctcctactccctaagagctcggagggtaagaatgactaccagttttgcaaatcttcaaaacagctcctaaaagagagatgattttcactgtaccacaggaaaaccaagccctggaaagcatggttaagtacagtgccaaaggcactgggccactcaatgaaatgggatccttctctggtgaagtcattgcccagtgtgtggcctgtggaagttactcattaaatactgggtacctaacttacctaggtccacatggtaatggaggcaggacccaaacgcaaatctgtcagccaccaaagcagccacctggctcttgccagaacactagcttcccccaggacctgaagccctggacttagaacaaatgccatttgtccatacctgcaactgtgtggatgccatttcttattcctgaaaatggtgtgtcacccttccagtgctgtgccacccttccggtgcagcggcgtgtcacccttccagtcctggtggtagagggaaagatcagcctctgcccacagaccccctcccgacccaccgtgctttgtaaccactgctcctggcccgggacttggttcagtaggagttctggtcctcagctcctgaccagctcacagcggctgctgtccacggctctgttctgtttctgttcttctctgttccagctctactgattcggcataggggagggggaaaaagtgtgagagaagagtaagacgaattttacgtggaattatctttcttacagtggttgcattgttctttcttgtgtaggtgccagcttcttaaggccaacaactctgtgaatgtgaagctataaaatatttagcgagcttatatttcagaaataagagtatacaatactgcgggggataagatttctgttatgacattaaattgccccaaaatagaaatactcccagttccctatgtactaacaattatttttcaacaaatgacaatcttaaactccctttgacaagagaaagctctgtttttttgcacgacttctgcagggtaaactgcttgttaagtgtagacttacaaatatagagacaacagatcttccgacattgcactgctgtcatataatttactgctttcttttcattttgacagtgaaactatagcagcatgcgaagtggttattccttatgaaagtgacatcatgtaactgctattatgagatattacatgaattggttatgcttttaccttgaaatggattttttaatatttcctgacttaatgaaaagtgacaggaaacataattaaggcaaagaagagaatctaggaagacattatcttgagttattccatggcattaactttatttattaaagtcgacatctcacacctacccacacgccatcttaaatcaagggattttggtgtgctttgcactgaagcatgtcaagatatgttttttatttaaatccactttctctttagggaaactgaggtacagaaccatctgagatctagagctaagtgtagatatgcctcatggagcgaggcagcttttcctgtatccacaatggaatacctcttgtgcctcctcctcgacccttaacaaggttacttaacctaacaaattgctcctctgagacagtagaactccatgaaggcccatgatatccaacccctttgatagggggtgttaaaagatggcactcattttcattgttagctgttgggatgaatagtgatactgccattgagcactcaccaggtgccgggcatgagttttataaatacatatgtaaatgtacacacatgcacatatatgcaccacctcacacagacacacatagaaacacatgtacacatatatgcaggtgcacatatacatacacagatgtacacacacatatacacacacgcacatgtatacgcatacacacataaacacatgcacatatatgcacaaacacacacacatacacacatgtaaacacgtagacacatgcacatatatacacacatgtacacgtgcacacactcgcatgaacacatgcacatacatatacacacacatgcacagacacacaaacacatccaatcttcaaccttctgaagtcacaattatcactaacctgcatgtgaggaaacagacaaagaaagggacaggtaatgtattctgcccaaggtgacactgtccgcgaggcatggacctgggatgtggcctgtgtcctgtcctctgcccctatgaccctgtgcccaagccctcccgcggtggctgagtagggcactgcagagcagagagggcttcatctccatctgaaccttaacctgactctcagctggaatctcctttccaaacaagagcatgagcctgtgtgggttcggagtggagcctggaaggcaccgcagccagggcggccacagttcatgccagctgttcctctcaacacccctccgtgtcgatggcttcatctacaacgagaaaaatagctccttatagggtggttgaaagcacgaatacacaagaaaatgcctattaaaatattggcattctagcctttgaaacagatgtgcttcagttctcacgtcaggaattatttttaaaatcctatttattcccattcctacgcaggggtcccccttcccaccctccagtggtacaaggatgccatctccatcagcaggctccagaatcctcgatacaaagtgctcgccagcggaggcctgcgcatccagaagctgcgtccagaggactccggaatcttccagtgcttcgccagcaatgaaggaggggagatccagacccacacctacctggatgtaaccagtgagtacacccaggcccacagctacctgacctggacgtatccagtgagtacactcagccccatggctacctggatgtaaccagtgggtacacccaggctcacagctacctgacctggacgtatccagtgagtacactcagctccatggctacctggatgtaaccactgggtacacccaggctcacagctacctgacctggacgtatccagtgagtacactcagccccatggctacctggatgtaaccagtgggtacacccaggctcacagctacctgatctggacgtatccagtgagtacattcagccccatggctacctggatgtaatcagtgggtacacccaggctcacagctacctgacctggacgtatccagtgagtacattcagccccatggctacctggatgtaaccagtgggtacacccaggctcacagctacctgacctggacgtatccagtgagtacattcagccccatggctatctggatgtaaccagtgggtacacccaggctcacagctacctgacctggacgtatccagtgagtacactcagccccatggctacctggatgtaaccactgggtacacccaggcttacagctacctgacctggacgtatccagtgagtacactcagccccatggctacctggatgtaaccagtgggtacacccaggctcacagctacctgatctggacgtatccagtgagtacattcagccccatggctacctggatgtaatcagtgggtacacccaggctcacagctacctgacctggacgtatccagtgagtacattcagccccatggctacctggatgtaaccagtgggtacacccaggctcacagctacctgacctggacgtatccagtgagtacattcagccccatggctatctggatgtaaccagtgggtacacccaggctcacagctacctgacctggacgtatccagtgagcacacccaggccgacggctacccagatgtatccagtgggtacacctaagctcacggctacccggacatatccagtgggtacacccaggctcacagctacctgacctggacgtatccagtgagcacacccaggccgacggctacccagatgtatccagtgggtacacccacgcccacggctacccggatgtatccagtgggtacaccttggcccacagctacctggatgtatccagtgggtacacctatcagcaaagccagacctgctagactgggccttcaaggtagaacttcccaaaatttgctccatgtactacacacagaaaatggtagtatctgttcagccccctgaggtaaacagaaggggtaatgtggccagaagtgggcagaccaggagagccagctctcaagcacacctgaagcctttgtgggtcctgtggggaaactgctgaggcccacaagcagcacagacggctgtcactccccggccctagtaccctcctcttctcagggtagcgttgcctcttcccgcactaagccctcctctttcttgaggagaagtagaaaaaactcccttattttctgggcagaattggaaagactattgagtgaatagatcactcctaatctttttcttttgatctttttttcctattttttacattcattctctattttacttttattgaacaattgtagttcttttgtgagtttcttttattatcccattaacagaaataccttggctctctgtctttgaaaaataaactcaaggtaaaggttttcattgtttctgtgggttttctttttaatcttccatggttgtataatactgttcttctaaaatgaagtagaatctagtgattatggaattataccttttgtgtttgccctttcgggagcaaaatgctgatatcctcaggggtgagagctgttggagagagcaaatcagtgtcactgtgtgcacagccaagggctcttcccacccacagcctgcaaggagactgaccaggtgtgtagcaagctgtgcatgtgtttcggtgaactaggggtcccttccttgaatcttgccctcgggtcaaatttgtctttcattttggagcttaggaaaccaatattgcttcaagcagtagaaataatatggaatgctcaagtcagaacatgagtcttgattgattagaattatttgaagcctatcttgcaatcgtgagctgggacgttcttgagcagggattgacaagctttttctgcgaagggcctaatggtagatatttttggctttgaaggatgtggcctactcagcattgctgtagtaacctaagagcagccacagttctcagcacatgcgagtggctgtgttccaataaaactttatttacaaacacagggtgcaggctgaatttggcccccaggttgtagtttgccaatctccattccagtgagagacttaggaatgagaataaaaaagaacccagagaacatctctgggtttctctcagcctcagttttctcatccattaaaatggagctaaccaaacccagattataggattctcatgagggtcagattggaaatgtaagtgaaagtgccacctgcactgttaccacggcagtgagtgagtgaacaaacaaatcaatgattgtgattatgttatctgttttgtagtaggaggttttttgcaaaatgagttttttaattaaaatacccttaatgaaaggaaaatgtgctttaaaaaatcgatattgatttgctcatttagcaagcggctgctgagcatctgtgtcgggcactctggatgaggctctggggacacggctgtgaggaagacaggtgaggttcctgtgcttccaggacagagggtctgcagggaggagaaaggcagtgaaggacgagatgactccagccagccaggggtgctgcagaaaaggggagcaggtgcggtggcatattgagccggggcctcccccagacagtgtggctgccgggtggggcttctctaggagagatttagaaggagcaggagtgtgaactcttggggacatgcgcattgcatgggctggaggggacatcaggtgccttggaggagcaagctcggcatgtgtgcaggtgaagggaggcggataggttggggctcagtgacaagcagggtggccatgacgggctggagggtggagggataggcaggggcagaggccgagaacaggaggagcctcgggagctgcgagcaagcagagaagggacatgaaagcctttgtagctttcaaagggcagcccaaggctggctgcctcagggaccctgacacaggcacagaagtgttgagacctgttagggggcctgcggcatctggcaagacctggactcgggtggttgcctgcgaggtggagagacaaggtcagcttcaggaagggccttggcagtgaagtttctgggacttgccatggtccatgggattctcagcaggtgcaggcagaggcggcggctgtgccctgggtcccgtgaggtctactcacttctttccttgaggggtatcagcccagggaccctcacagaagacttgagagacacagatcactgttgtacggggggttccggttaatcgttattgggtagcacagagttaggcgagccctcgctgaagccatcaggagctcctcctgtctttcctcggtctgactcagggctgctcggggccgtgaccatcccccatgaacaagaagaaacccagcacttggggatcatgacacctcccagaaatgtatctttatggaggtctttgaaacctggttattttaactctcagaacagatcctagaaagcatcctagaaagtgtcatcttgtggatgacattttgtattcaataattagcttttttttttgtttttgtttttgagataaggtctcactctgtcacccaggctgtagtacagtggcacgatcatcactcactgcagcctcagcctcctgggctcaagcgatcctcctgcctccacctcccaagtacgtgggactataggcctgcaccaccatgcctggctaatttttcatttttggtagagacagggatctcactgtgttgcccaggctggtctcaaactcctgaactcaagcagtcctcttgcctcagcctcctgaagtgctgggaatataggcatgggctacctttcatttaaagaacaaaagcagtcttttggctgatctaaataaatgcctctcctctctttaatattcatcaaaaactgttcttcctgggcccctgcacgtttccacttgtgtatctattacatcgtgacgctgtattttctctccaggttgtaaacaaagatcggtaactcctgggagaggaacagtggagggctgccgtccctcctgaacagtattccttttgtattgctacagttacctctgtgattggctctctaaagcccgtgcaggatactctgccaggctgatgtgagcctctcaggaacaaggccctgatcatttcatttactcctcttctcagatatcgctccagtgttcacccagcggccagtggacaccacagttactgacgggatgacagccattctaaggtgtgaggtgtccggggctcccaaacccgccatcacctggaaaagaggtgggtagcatccactgcccacaacagcatggcccatgtagaacataacctatcgggccagtgcttgcttcttattcactctcttgtttattcacttatgcattcactcaatgaagattaaataactcttattgcagcagtccccaacctttttggcaccagggacctgtttcttggaagagaatttctccatggtctccagtgggggctgatggtctaaggatgaaactgttccatctcagatcattagattcttctagggagtgtgcagcctagatccttggcatgcatagttcactggagggtgtgcgttcctatgagaatctaatgctgctgccgagctgacaggagggggagctcaggcagtcatgcacggtggccaccgctcacctcctgctacgcagcccagttccaaacaggtctgcagcccagggcttggggacccctgatttacagaatgcctaccaggtgcaagataccatgggcacaaggataaataggacagacaagatccctgccttctagaaagggaaacacacattagaaaaagagaaggattgtgcaaatgtcactcttctctatccacgcccttcagagagtgcctcaggcctcctcgggccttaccgtgtcaaggactggatgtgaagtcactctgctagcactcacttttcccactgttaagtggagctcttccttgtgacattcagaattaaggatcacggcctttgttttgttgaagaaagatgcttccagggccacatcgttccgtgccttctgcagtcaacctgggacgcttcagcccactgtgggttcagttcctgggaaggctgcctttgcagttcccatagcccgttccatgagggccactgaaggaacagcacacagagtccatcctgaacaagtctgtgcttagccttgttgattcacatggatgagctcctcatacttgctgggctgtatcgggctgacatgccaaaagccttatctttctcttccttctggaaaaccacctggcagcttctcgactctcagaggtacaacccctgcactcagacacagctcctaaagatctgggacactacagatcaataacagggctgggcttttattctctcttgttttcctgcctaattttgaacataatagctttatataaaaatgtttcaaatacatgcagatataaagaaaactaaaaaccgatcacccaaacatagcaatcacgttcatggatcataatttgtttaaccaaatctctaaatattgagcaagtaggatgttcttggtttttgttattctaaacagtgctagcaggtactgcttcagttatttcttttcctacaattttcactttattctgattatttccttaagttatttctttgttgtattagtccactctcacactgatataaacacatacctgagactgggcaatttacaaagaaaagaggttgaattgactcacagttctgcatagctggggaggcctcaggaaatcatggtggaaggtgaagaggaagcaggcgcatctcacaaggctgcaagagagagaaagagcaaagggggaagtgccaaacagttttaaaccatcagatctcatgagaactccctcactatcaggagaacatcacgggggaaccaccctcaggatccagtcacctcccaccagattcctcccccgacgtggggattgcaattcgagacgagacttgggtggggacacggagccgaaccatattacttgcttatggctctaaccactatcttcatttccttcaagcgttacgactgtaacatgcctcttttctccactgttctttagaaaaccacattctggccagtggctctgtccggattcctaggttcatgcttcttgaatcggggggtctacagatcgcgcccgtcttcatccaggatgccggcaactacacctgctatgcggccaacacagagggctccctgaatgcatcggccacgctcactgtgtggagtaaggagcagccctcgcacgtcggccttctgttagccacggtttaatcatcacgtcatcgtgtgctttggggatgtcagcatgcccttgggcttgctaatttaatcaaaagagaatgattatttttacaactaatttatagaaatctgttgagaaattaaattttcaatgtctaaaagaatacctagaaaatgtattcagagatttaataggggcattgcaggagagacgaaagattgactttgtaaagtcagtggagatattacacaaaactagctcaaatcacaaaattgataggttggttaattttataagcattttataagaaaattaagaattaaaatcctaaagaagtaatattttgctaaacatttgttagggacaactaaaacacttctaatacactaaccatcaatgtttcttgtatgttaggagtgaactgaaagaaaatcttccgcttttgctaaacaattgttaggaacaactaagacacttctaatatactaactatcaatgtttcttgtatattaggagtgaactgaaagaaaatcttcagcttttgcactttttaaaatcaagacacattttggaaatgcagagtagttttctggagcttaaggattggaccaaatggtcccccattgccactttttaacttcaattgccaatacactttctcctctctgtctcatctcaatctgtactactaaaaactcatattcaaaaagcaaaagaatgctcactcagatttttacaaatctatctacatgaggagagaaagttttaacttgcttgagggagtaatttgttgaaacgttattcttccagaaaaagtaaatcattgtgcttcatttcatatttgtctagcattttctatcatatggttggtgtccactttgataaacgactcttcctaatttgtaaaatgatcatgcgtttaaaggaaattaatccaagttcccactattctgtcaagtactaaaaagcagcttttgttccatttggtggatgactctgtcagccacttcgttcattctgtatccctaaatagtaaccatacatttaacccatttatgcctgaggttgcagttttttgaacttttgtaatcagaacttggcgatgaccttgagcagtaggatattaaaaagcttatgaaaaagtggtatctgaatctctgtagatcattcgccagaaaattttgtggatctgctgagattcaacattatagcgacactagcctgactgggataacgctttggtggctttacagaacattttcacacactctgcccactttaacctgtacaactattagtgacgtaagcattccctgccatagccaggaaaactaagatgcagaattgtttttctggactcaccattagcagaggtcaggcttgccctcgaacttagccttgtgactccgaagttctgggctctgttcctggaagcagagcaggtcccccttagaggtatgggtgctacagtgacccatcgcacaggcaagctgggggtccccatcccgtactggcttgggggaggtgggcaagtcactgcatctctgagcgtccatcttccttcctgaaaactgagaatagtaatatttagccctcacaagagtgtcttgaggaataaacacaactcaaacaaaaacacttgacagactcaaaaagtaccatgcagacgctagaaatgactagaatgatggtcatctagggagagaatctaggttttattttagagcctagaacctcatccacacctgcatggggtggtcggcattcagttacttccatggtgtttgaggttaaagctgatttaggaggggtgggtgggttgacagactgctgcaatggtttacttatttgcttgtttttaactcccctagcatttctgagagtgatccatttacactcattctgccaagatgagagaaaactcggaggttgtgatgtcagatgaccagggcattatcccccctgagggcagaaactgtcaaacttgtcatttcgtctgactcgtgacttgtgtttttttcagatcggacgtccatcgtccaccctcctgaggaccacgtggtgattaaggggaccacggccacgctgcactgtggtgccacacatgacccccgggtttcactccggtcagcacaatcagttacaatgctttggggcttgttgatattctgtgagtttctgaagtgaagttgagatgaggaggaagaattgggggaacttttgatttcagcagcaggtccctgattacggtatcttctggttgtgggcaccgtcattaatcatgcaaatcccattttccactccagccttatgtgttatttacagtgagctatgttccacttcatgacgttaatgctgcttttcatgatttttcctgccaaggttaatacactatctgtaaaacgtacttgtcagaggctgatactcaatgagagaaaaatccagggggatcgactaggattcagcattgtttacacgggggctgtgccactcccgggagagttctttactctcgggatagtttcatcgtgaaatggagggggagggagtcctgtgcatgggacaaagtcacccacagcccccagtgcactaataggaaggtgcatgccaagagggaggccagatgtgagggttctcttttttttttttttttttgagacagagccttgctctgtcacctgagctggagtacagtggcattatctcagctcactgcaagctccacctcccgggttcacaccattgtcctgcctcagcctcccgagtagctgggactacaagtgcctgccaccactcccggctatttttttgtatttttagtagagacggcgtttcaccatgttagccaggatggtctcgatgtcttgacctcgtgatccacctgtctcggcctcccaaagtgctgggattccaggagtgagctgccgtgcccggccaagggttctctaaaggaatgccgacatcctgtctttgtttaaattcgggccaggaaagtaactgcaaaatatgagactccaggtgaagttgtggtggcagacaggtgggcatcagtggggagctgttccctgaagagcagccaccttcaggataattttaaatttttggaatcagccttgaaaataaaaaaggaaatatccagtcatcagagtatttccactctggccttagcccagaaggggcacagtgcatgagtcgaatgggcagactactcaagatgccctgctgctttctggggcctctcaccccgagcagaggggacagctgtgggtgcacagtcagcagcgggacgcggagactcggctgttctctcgcgcttcttgagcgggtgtttggccaattgtaaatttccatgtcgccacccgactccctggggtttcccagggctcagaatccaaatttggtttaggtacgtgggtgccgaatgcaaaacaaaacaagcaaaacaaaaaccagcaagtgaaagacgacctaggacccccctgggggccaccctggagacggtcgtcaggcctcggaaagagctccttcctaaatgatttggagtatgacttcaaggaagtctgcttttctgctactctgacagctcagaaagaaccccctcggatccctgtggtttcgtagtagcttgttatatgtgattaaattggaggccccttcctcagatggaactgggttactcgctctcggggtgcccctcgtcccagggttgctctgccctgaggagcgccaggctgtaagtgaccagccagccagatgcgatgccccggcgtgagcagtctatccatctccctcttgtggaatcagccctgttctatctcagggtaattgctgagaaggtagtttgtaaatgtctgtgcttatgactatgaagtctttaaagaactgggcacatttgcaaaacccgatcaaattattgtggaaaagaaaaacagcactttcattccatatagcaatgagtgctggccctgcccgtggtcatctaaagactgggcaggctctcaattgattgtgtatttgaaaagaaaaatgtgctcaaattgctacagatagattaaatgagaaataaatgcaattttaaggaccatctgccagaatggtcacattttaagaaagtgtgtttttgaagggtgattttttttttcatgagttgggcaattccactctgtagattttttttaaacagtcgttgcctcctgtccagacaacactcttgtcctccaggagcatttaccggggcaggaatgttgggtgcagttttcataggtgacaggtatgcccgtggttctacagacttctcatctctaaaacacaaggtcagacaggcagggccagtcattttcattgccctgtttgtaacctcagcatgtgtttttgtattatgaccaagatttctggttgcttttcttttttttattattttttggtttaattcatatgccataaaattcactcttttaggccaagtgcggtgactcaggcctgtaatcccagcagtttgggaggccgagacgggcagatcacttgaggctaggagtttgagactagcctgggccacatggcaaaacctcatctctattaaaaatacaaaaaaattagccaagcatggtggcatacatctgtggtcccagctactcaggaggctgaggcacaagaattgcttgaacccaggaggtggaggctgcagtgggccaagatcatgccactgcactccagcctgggccacacagcaagactctgtctcaaaaaaaaaaaaaaaaagaaagaaagaaaaagaaaagaaaaatcactcttttaaagagcacagttcagtggtttttaaagtccattcacaagattgttagttgcttgctttttaagagacagggaaggagcagtgattctgtcactgtggggtttgtaactcaagaccctttgcttggcccacagctacgtttggaagaaggacaacgtggccctgactccatcgagcacgtctaggatcgtggtggagaaggacgggtcccttctcatcagccagacgtggtcaggcgacatcggtgactacagctgcgagattgtttctgaaggagggaatgactccaggatggcccggctggaagtgatgtgagtactgagacgtttggtgttagccagtccgcggttttctccgttactgtgcccctgttagtgactgccacttcacaagtgtcacgcccggcttgtgtcccaagtcagcggtcagaggccagcgcatcatgctgcataactacatatatggacaaggtttttttgtggtttctttcaacttcggaattgagaagtttcgtttttggtgtagatggtgtgatcattggtttttatttcagttgatcctttttgtcatatttttcccgtggacaccttatcctgataggccctgtttaccactctgcgcttaagtagcaagttcatttttccacataatacccttgagagcctccagtccatgagagatgctggagtgggactgctgaggcgaggtcgttcccgtgaaagccacctagacttggggtttcagtgagtcccagctgcccctccgtgggtaaatagatactttaagttaagtcttgtgaaatcttgaaaacagaaagcaactgcccgttacttccaatctggaccttcctgggggttccaaagagcccaggcgggaaaccgtcaatctcccccgtctctgctctctttctccctccactcccctctctattcatggagcaggaaaccaaaatacctgctgacacattttatttttctgacatgtatttatttgctttttaaaagttgtgccatctcaatattccgtgagtgcatgagtacaaaaataaaacctgaaaataaagaatcccaaccgagcactcatcaaggcagtggccagctccagggacacacccagcgcatccgtccctggtcatcgtttgacatgctgggcctttcgacaaaggcaatcttgagagatttttcctcactggaccctgccccctttgatccaggaaagattctgtattcaaaatcattccccacaaatagaatttgaacactccgagtataggagccgtgactcattgatccctgaatcccaagactccagctgaggggattaaaaatgaaaagaatgcttgctaagtgctaagcatgtggcttctgtgtctgccacacgcatgtggaaatgagtgaactcacaaacagctttcctgtagtccctatttgtggatataaaaggttcacgatgtgtagcagtcagtccggaaggccctgtggtgtcatcagtacctgaaaaacatcccatcccaactcctgttctgtctccttccaggatgaccccttgttctctttagatagcagaggtaattgtggttagttaggaagcggcaggagtccccatggctctacagaatcagccggcggcagtggtgcgggggtcctggtgctgcagctgcaaagctgccacgtagagggtcctccagagaatcactgagggtcccggggctgaggctgccacgcagagggtcctccagagaatcactgagggtcccggggctgaggctgccacgcagaggatcctccagagaatcactgggggtcccggggctgaggctgccacgtagagggtcctccagagaatcactgagggtcccggggctgaggctgccacgcagagggtcctccagagaatcactgagggtcccggggctgaggctgccacgcagagggtcctccagagaatcactgagggtcccggggctgaggctgccacgcagagggtcctccagagaatcactgagggtcccggggctgaggctgccacgtagagggtcctccagagaatcactgagggtcccggggctgaggctgccacgcagaggatcctccagagaatcactgggggtcccggggctgaggctgccacgcagagggtcctccagagaatcactgagggtcccggggctgaggctgccacgtagagggtcctccagagaatcactgagggtcccggggctgaggctgccacgcagagggtcctccagagaatcactgagggtcccggggctgaggctgccacgcagagggtcctccagagaatcactgagggtcccggggctgaggctgccacgcagagggtcctccagagaatcactgggggtcccggggctgaggctgcgaggctgccacgcagagggtcctccagagaatcactgagggtcccggggctgaggctgcgaggctgccacacagacggtcctccagagaatcactgggggtcccggggctgaggctgccacgcagagggtcctccagagaatcactgagggtcccggggctgaggctgccacgcagagggtcctccagagaatcactgagggtcccggggctgaggctgccacgcagagggtcctccagagaatcactgagggtcccggggctgaggctgccacgcagagggtcctccagagaatcactgagggtcccggggctgaggctgccacgcagagggtcctccagagaatcactgagggtcccggggctgaggctgccacgcagagggccctccagagaatcactgagggtcccggggctgaggctgcgaggctgccacacagacggtcctccagagaatcactgggggtcccggggctgaggctgccacgcagagggtcctccagagaatcactgagggtcccggggctgaggctgccacgcagagggtcctccagagaatcactgggggtcccggggctgaggctgcgaggctgccacgcagagggtcctccagagaatcactgagggtcccggggctgaggctgcgaggctgccacacagacggtcctccagagaatcactgagggtcccggggctgaggctgccacgcagagggtcctccagagaatcactgagggtcccggggctgaggctgccacacagacggtcctccagagaatcactgggggtcccggggctgaggctgccacacagagggtcctccagcttttgtgtacgcatggggcagccaggtttcccccagcccctgccttcaggcattggagcctacgaccctgggttctttctgcccttcatgagccccagccatccactgtctctgcggttgggtgctgtcatccgtgggcttccccggaggtctcctgatcatgcaccccttagcattcaacgacagtagcacttcctgcggttcagttaccaggatgctgcctgcagttcttccctgcgcgcagctgatcctcctggtagcactgatcacgctgcagaggacgaccatatcttcatggctccctctcctcctggaacagaagcaccttggtggcactgttttgaattttgagtgcctgatgtagtatttgttgtataaccgttgttcaataaatatatgttggttggttgctgcctgcgtgcatgcatgaaggaatgaatgaatgtgtgtctgccttggtggcccattggcgggcctccttctgttccctactcgtaccttgatgctcacatgccctggtttccccaccatgggtatacaagtaagctcaggtcgttctaccaaaacccaaacagtgagtacccaaagccctcatccagccctgctcctgcctctttcctccttcctttcgggtctcagacagaggattttttttttttcattttgataatataggaggatatggccagtgagttcctaggagctgttgtattatgcacatttttaaagctacctttgagaaccttagatcatccatcgttggtatcaaataaataagcgttagcagttcataaagactctgtcagcagaagccaaattgcatacttccaatatagcccattctttttattctgcacagttttatggtctactgatttacatgtcttccctactatttgcttatttgatttcctctaagtaaaatacatttttcagcaaatgttgctgtatgtataaaataataggctttctctaacggtaaaacatctcatctctaaatatagaaatctctgcaaatttgtgattcaaactaatttaagtacaaactggttacagaactgatttggaagacagttgttcctcgtgaattgttagtgtcacgaaggctcctctatcccaaacctggatgaattgggaaaggtgttccttcatggggtgtctttagatccaacagagcttgactctacaacaataatggcaatagaatgataataataataacccgtgattgcagggcattctgtccttcttgggtaactttcaaactgagctctgtagtgtttccatcatttactcagataaccaaaaaaaaagcaagagaaaaatctcatattgccaaagggaagggactgagaggtgcttatgactaaacaatgtccttcagaggagcctgaaagcctgttttctccttgcctctccacttcagttaaaagctgcttcattaaatatagaaattacgagcatctgaagtgagcttttcaaaaatagaccagccgttggcctcttctcacgtctgtttgccccgagttttacacttagcactaagcttcacctcattgaggctgagtggaggggcggcccccacacccacatcacacccacagcagtcctgatggggctgctggacagcagtggggccaataggagcaaagggctgcacaggaggccctgctcacctttcactacttgtgtgactttggacaaatcccctcacttctcagcttctgcctctcaccttgtagactgggcatggtatcattcatctcaaaggacggctgtgagggcggcacccacccgggtttgtaagatcctgttgtggaagccagttggggagggatgctctaagtcctagctcttcgtgctttcttaccatcttatactagaatgctgttcccccctttcctaacagcaccctgcctcctggggctgggaactttctagccctttaccctgcattattctgactacattctatgaccttctgacactagactcgagatgtgtctgtttgctgttgagccctcaatgcctggaccagtgccaggtatacagtaggaacctaataaatgtctgggtaagcctcactccacctactgagctgaaatgagacggtgtcttttgccctactgaggaggaccaatttaggagggctctgccttcatccccccactgagagaagaggcttctaaactccagatggttccatgaggcagcctgtaaattaacaagacaagtcatcattaaatgctggtcaccccttgttttagtagcgtctttgctctagttttctagtgccatggggacaggagccagtttccaggatgacttcatattccccaaagcatcttcctgtattgagcacaccagagggaccaggctcctaaggccttatggattgattaattgttaaatcatttaaagacccaattagcatttcatctctcctcctgaaatcagagtctaattctcatgggcctggagtacagagaaaacccaatttacagagctgacttggagaccctgaggcattgggagaggtttctttctataaaaccagttctgacagagccctcgtaaggagtgaagaatttaatactgtttcccccagagttatcaagccctgtcatcttcatcctcagagtgaagtcaaagaagatgggtttgaccaagtcatcatttgtgcattaaagggccaatgctttttatgtagaaaaaaagtacttatctgatcctcttctgccagagcaattccccctacagccacaatttcaccaattgctttctttcgagtctttttcaaaactgtttttctcacacacaccttgcttcatctctctcccgtactgttgggtttccgttactgttgttgttaatttctgatattcctgaggtgtcctgtgcctgacggtggttttccccctattctctttcaattacaaagtgactcagcactgggcttcgcttccattgttctctgggacctcttccatttatcagcctctgtgcttatcactgtctgtgagtcactctactgatcatttatctcctttcaaagctggcagagtaatgcttcgacgcaatctatccccattagataagattttctgaaatggattcagaatatattaaagcctcatttatctgttattgatgggttagtcaaggatctcacaaagcttcattttccaaataaccaaaacttatcatttaaagaaatagtggctggccgcagaggctcacgcctgtaatcgcagcactttgggaggccgaggcaggtagatcacgaggtcaagatttcaagaccagcctggccaagatggcgaaaccctgtctctactaaaaatacaaaaattagccgggcgtggtgttgggcacctgtaatcccagctactcaggaggctgagacagagaattgctcgaactcaggaggcggaggttgcagtgagccgaattgcaccactgcactccagcctgagctacagagcgagactccatctcaaaaaaaaaaaagaaagaaaaaaagaaatagtttatatttccagaataaggcacgccatcttctattgcatgcctcaggtattgcacgtttgtttttgttatttacaaactggaggtttgcagcaaccctgtgttaagtaagtctattgatgcaatttttccaacggcacctgctcacttagtgtctctggtcacattttgggaattctcacaatgtttcaaactttgtcactatgattgtatctgtgatggcactccctgatcactgatcttgaatgttactattgtaattgttttgggacaccatgagccacgccgatgttaagatggcaaacttaagctataaatgccttgtgtgttctgactgctccaccaacaggccattccctgtctccctccgtctccttgggcccctgtattccttgagccccacagtgtgaaatttggccagttaataaccctgcaaaggcctctgagtgtccatgtgaaagagagggttgtacgtctctcactagaaagcagactggaaatgatgaagcttagtaaggaaggcatatcgaaagccaagacaagacaaaagccaggcctcttgccccagttagccaagctgtgaatgcaaagggaaagttattgaaggacatttaaagtgctccagggaacacacaaatgataagaaagtgaaacagtcttattgctgatgtggagaaagtttgagtggtctggagagaaaaatcaaaccagcctcaacattcccttaggccaaagcctaacccagaacaaggccatagctctcttcagttttgtgaagacagagaggtgaggaagctgcagaagaaaaattggaagctagcaggggttggtttgtgagatttaaggaaagatgccgtccccataacataaaagtacaagataaagcagcaggtgctgatggagaaacttggtaagttattcagaagacctagctaggaacagtgacgagggtggctacagtaacaagaaatttgcagtgtagacgaaacagccttttatgggaagaagataccatctaggactttcctagttacggaggagaaatcaatgtctggtttcaaagcttcaaagggcaggctgactctcttgttaggggctaatggagctggtgactttaagttgaagccaacactcatttactgtgctgaaaatcttagggctcttaagaacgatgctaaatctactttgcctgtgctctgtaaatggaacagcaaagcctggatgacagctcttctgtttacagcatgttttactgaatatttcaagcctacttttgagacctgcagctcagaaaagaaaaattcctttgaaaatattactgcttatggacagtgcaccttgtcatgctagagctttgatgggaatgtacaaggagatgaatgtgggtttcatgcctgctagcacaacatccgttctgcagactgtggatgaaggtggacttttgaccatcaagtcccattatttaaggaatatatttcataagactatagttgccatggatgataattcctctgatggatctgggcaaagtaaatggaaaaccttctggaaaggattcaccattctagataccattaagaatgtttgtgggctgggcgcggtggctcacgcctgtaatcccaacactttgggaggctgaggtgggtggatcacaaggtcaggagatcgagaccatcctggctaacatggtgcaaccccatctccactaaaaatacaaaaaattagccgggcttggtggcgggtgcctgtagtcccagctactcggggggctgagtcaggagaagggcatgaacccaggaggcggagcttgcagtgagctgagatcgtgccactgcactccagcgtgggcgacagagcgagacaacatctcaaaaaaaaaaaaaagaatgtttgtgattcatgggaggagatcacaatatcaatattaacaggagttgggaagaagttgattccagccctcatggatgaggctggaggggttcaaggcatccacggaggaagttgctgctgatgtggtggaaacagcaagagaactagaattagaggtggatcctgaagatgtagctgaactgctgcaatctcatgatcaaacttgtccagatgaggatttgcttcttatagatgagcaaagcaagtggtgtgggacagcatctacttttggcaaagataccgtgaacattgttgaaatggcaacaaggccttagaatattgcatgaacttagctggtaaagctgtggcagggtttgggaggattgactccaattttgaaagaagttctactgtgggtaaaatgttatcaaacagcatcacatgctacagaaaagtctttcatgagaggaagagtccgttgatgcgccaggcttcactgctgtctcgtttgaagaaattgccacagtccccccagcctatagccccaccactccgatcagtccacagccatcaacatccaagcaggaccctccaccagcaaaaagactgtgactcactgaaggctcagatgatcaccttttttagcatgaagtatctttaaggtgtgtacatgttttttagacataatgctattgcacacttaatagactgcagtagagtataaacagaacttttatatgcactgggaaaccaaaacgtgtgtgacttgcaaattgcaatattcacttcattgtggtggtcgggaactgaacgtgcagtatctctgagacatgcctctctatcacaaggcccttcacattatgaaacaggtgatattgaacacaagagatattatcaaggggattttcacagaggggagagactgaaactgggaaaaatcaatatttccttccaatgcttgagtcctgtgatttaccaaaatatcacactttgccctgggccatcacactgagtgtgactttgagccaatggagtgacttcgggggacagtcgcagagaaggacgtgtgcgtctctgcacatcacgggcactcaggtcctcgggcactgccaggcgggtagctcttgccgcctacactaaacgcctcaagactagtttgctttctaagtttttaagtatttgtttttaatcttttaaaaaatctttttacatccctcaatctcaggctgttgcgaccgtttttgctgttgggtgtgcctgcttcgggtagatacttctcatctgttgcttgtggtctgctggcagggggaaaatctgaaaccactctgactagaatcacatcctagctgagagggggcagagggatggagggacatgtgtgagcatattccagggactgtgagagctgacccctggaggacagaagctgccccgtgagtagcctccatttaagtgagtgtctgcaaagcactgcagcctcaagagaaaggcagtccacccacctggcagatgggttgtttctgtgtgcactctcaccttgggctaagagaagcgtgatttgaaatcaagtgcaagaggccgcattttcacctctgtgagaaagacagacttttagaatttagaattcgatcaaacataacccccttgaggtcatcagagaaagtgtgcagagacacagcagcttgtcaggggccacaggtcacccatttctgttgtctcccaggagcctgttcacatcttatagcatatggtcacctggcccgagaatgtctgttttgcaaggtttgtcctgagctggctgtacaaccctctcctgccctggcttctctccaactcctactgtgtgtgtctgcagagctgcctggctcctcgagcctctaacccacctttagtttcacggcctatctcccatcctgactattacagatggtcatctgacattgtgtccagtctgtgagaacggcttccaatgagctgcccttggggtcccagaaccaatgtcaaaaagacatcccagaaattgtgaacataagctcattgctggtctctctgtgcaggccagtgcattttccctcaaccctgtctggcctctctgccacccagggcaaatcctgcattcctaccactctcaccgaccccaagcctcccagagttgaatcactggctgcatggttgaacctagtccccagccccctccactccccagaggtcagaaggctgagccgtcaccactggctcaaagccccaaccctcttatccccatgactggccttcccagcatggccagacccatcctggaaggatcttggggcccaccatgagtccacccaagaagcataagctcagctgtggtctgagaggttcaccatggtggcgaaaaccgtcccagtcactcaggaaactaaaacagtctggaagttccatctcagatcagatacattctttatgataaaccatcttatttggctatatctgtcagatttattcatattttcttttcaggtgggactttttcaacaactttggtttggtttcagaccacaccgattcagattgcagcagggggaataggaaatggggcttgggaggagtagaattgataactggcatttccgcctctaatggagattcggttattggagaactcaaatagaaatgacagctctgcccaggtgcagtggctcatgcttataatcccagcacttcgagaggccgaggttggggaggatcgcccaaggccaggagtttgagaccagcctggacagtatagtgaggccctgtctatacaaaaaataaataaaagaaacaaactattccttttctgattcaaaacttaattcacaattaaagagaaaacaagacgacatcctgggctcgcatttattctttatcgcactaatgtacaatgtagttgcagtctacattagaaatattagtatgcttataaatggtgcgtatgggttagagctgtttcttggggaactgaaagctcaaaacagcttaataaatttcaaaatgtaatgagtacatttttaaaattaaaaatatcaagtataattatggctttgtgttctgacctgtgtgggtcagcagtacctgatgtctgagagaccaaaagctggttagcggtgacccgggtcacactcagcatcccctcttcccggcactgcctggcagcgtttatggaggggcagccatccaggacagccccggaacagggtcctgctccggattcaggagacgtgaaggttcagtacagggcccgggcagctcatggttttaaggttgtagactcagccttggtagaaaccatgtagtagggttttgcagctttgtcactggttaagtcccagtaaaaactttttttttttttaactagtaacttatttaaagaatttattcgctttaattgcatttccatttcatagccttgctgatgtgttctttaccatttccatgggattttagtgagtggtttcaccacacttcctccaaatccccataactccagcagaagacataatgacaatgtaacctcatgctgtcaataaatgcggcaactgtgtggtctaagaatacatgcaggcattttcgctcataactctaaatggctagtgttggaaacattcccgttacatgtatcgggacttttcctgcatatgtggcatttccatgaccagcttctagttgtaaaaaacaaattgttgaccacgttttctcaattaaataatgtatgtgtaggccgggcatggtggctcacgcctgtaatcccagcactttgggaggccaaggcgggtgaatcacaaggtcaggagttcaagaccaacctggccaagatggtgtgaaaccccatctctactaaaaatacaaaaattagctgggcatggtggcaggcgcctataatcccacctactagggagactgaggcagagaattgcttgaacccaggaggcggaggttgcagtgagccgagcttgcatcacagcactccaggctgggcgacagagcgagacttggtcttataaaaaacagaaaataataatgtatgtgtaaacgtctgcgtcccctccccctatttatgtgacagcgtcagtacttgttttggtagctagcataagggttccatgaaattatgaccagaaaacaaagtaacactgtgaataatgaagctgggttttgtgtgtccttttctggggggaagagagttaatatttgtgtttgggcatattttatgttattcatttcccaaacatgacacagcaggacggtctgctgtaagagctcaggctcaccatggattctgacatgtgttttcctctttttccttttcatcccattcaattcaagtgaactgcctcattcacctcagaacctcctggtcagccctaattcttcccacagccacgccgtggtgctctcttgggtccggccctttgatggaaacagtcctattctttattacatcgtggagctctctgaaaacagtaagtagcaaaatgaaactgtcaccatggacgataatcagatttttgtgtgtgctcttaatgtccttaacctttacttctgggtcagacccaaaacaactactaaaatgctgtaatgctttacagggtttcaaacacagcctgccctttaggaaagaaaaaaccatgcaggacctgagagagggaagggaagaagtccttagttagaggggctcttggtggagagtggatttggggccccatgggagggctgtgcacacagggctgccccgcacagtgtcactcccagggcgagctggaaatgggttaacaatgcctgccacctgggtgacttgagagttcaccgtcgccgccactgctcatgtctgtgggaggttttctccggtgtagacgtggtgtcaagtgttcagcaccctcttcctgactcaccttccaggacccctctgcccatttaccgccatccttggaactcttctacatgaaacatgctccttccgtgggccactcacagccttggctctcctccagccgccaagccctccttcccttctcttcccagctggctgggtgacgtgtgccccgccgtgtgcacccactcacgcctctccgctctccctggaatctcttcctgggaaatcgcatgcactcctgtgattttaagtggcatattttccttgatgactcgaacatttgtatccttcacccaggattccaggatcacttatggggcccagcaacttgacatctgtatcgggttgtctcacggcctctccagcttaacttcttcccactgcatccatctttttaatgtttttttttttttttttttttttttacctcactcctgcagccacccaaatctctgctcccagcaccccgcatttctatattcctctgccagaaccctaggaatggtccccaattcctttccctggaccccagcccccacctccacaccccctgcatcagcagtcctatcagtctgttaactaggattctgatccctttcctctctgcctcagaccactggtacctctcgccaggaccactgcagcagccttccagccggccctgtttcctcatccaaaccattcacctgccagcagcaacactgatcttcctgagatatacccagaccaggccactcccctgtccacgtcctgcaggggttcctgctgcgtgcaatatagaagccaaatgcctcgctccctgtgcagcctcgggtcaccctgggctactgtgctctttctccacaccggtcagccacacgggacacatgaaactcaacacggattttatgttgactccctgaatgggccaaatatctcatctcatggcatgttccttcccctggaaacccatagagctagattgtcacccttcatgatagataatccattacctccacaaagaagctctccagcacgccagcccgatttcaccttttgttttttgtttgtttattttgagatggagtcttgctctgtcgcccaggctggagtgcagtggcatgatctcggctcactacaacctctgcctcctgggttcaagcgattcttctgcctcagcctcccgagtagctgggactacaggcacctgccaccacgcccagctaatttttgtatttttagtagatattggccaggctggtctcaaactcctggccttgtgatctgcccaccttggcctcccaaagtgctgggattacaggcatgagccaccgcgcctggcgtccagtttaaccttttaatacgtaagctgccggcctccctctgttatcctatctgtattagtcggttttcacactgccaataaagacacacccaagactgggcaatttacagaggaaagaggtttaatggagaactcacagttccacgtggctaggaaagcctcacaatcatggtggaaggtgaaagtcatgtctcacatggcggcagacaagagaagacagcttgtgcaggaaaactccccttgtactaaccctcagacctcgtgagacttgctgtcaggggaacagcacaggagagacctgcccccatgatccagttacctcccaccgggtccctcccacaactcatgggagttcaagatgagatttgggtggggacacaggtgacccacatcacccatcatttattccagatgagggtctccttccctgagcctcccccaggcagagccagatgcaggtatcctggctgttaacacgatccactttattcggcctgtggttgtctctggatgatactggtgttctaaacgggtccctgttttcaggacacctaggagtggtgcactctcgggtaccctcccctgaaacccagctccccgtgggtccctggtgctgctcacttttctgggcagattcagcctgagttctgccgtggctcttcccagctgatgtcagcctgtacacgcccccagcaattattgagataactcactttatttctcctaattacctttctacaccctcgcccttccctgggggttcccttctgataatactgcatgttcacaccacagccacacagtttaatccccatttcatagctacgggaatggatgtgcagaggctgtaagtcactgtcaactgcccagggtcacatggcgatgggaggggaagatgggatccctgtgctgtctgactccagagccggtgctcatgacgagtgtcaggcatccgcagaggagccttcggaagcagagtgtgctgtcctgcactacagcggggcttcagggagaggccacacttgggcgttggtctgtgtggacgtggaggaagccactctgtgaatctgaagaaccattatttgagttctgcaccacgcaaaccagttcaccgagggaaggcccagaggcagtatgttattccgggtcttaggcttctaaggttacaccttccagtcctgggcaccacctcggagtgaggccagagtccaggcccttctcccccttgcaggggcatctctgaggccggagtccaggcccttcttcccctgcggggggcctctgcaactcccactcgggcctctttcctcccagagatggggcaggatagaaaccagcgtgtgtgcagacggccatcttagcttccattcaacggctctgaccgaacggggaaggccagggtgttactgattcagataacttctgagagtacagaagagtttcctgaggatggcgtggccatgctgcctgtacgtaaaacaggacttgacagtgatctggacggagagaatgggacaggggagagctcgtgtcatctgaattctggttcgcatccaccctaaggacagcccccatcaggcgctgtcgcctcgggcttcaggactgtgtctcctttgtcttcgtgctcctcattccctgcacttagtacgtactcagcaaatgaggtgaaattcatctctccagtggagtcctcttgtgatgcactgaaaattacagtcatggaccgtcttccaaaacagaggcattctaccttcccccgtttccatgaaagaaggcatggctttgagatgcctggccagcgctcttctcagctgatggcatgactggctcctccagccagttagcttgcctccatgagaagcaggtttcgtgtgtaactatccagccagccacctacctgttacagcggtgaagccagctgggcatctgctctgcactctgctgggtgctgggtgcagagctgacgtgatcagtgtccactgcgaacagcaaggagacagtcagaggcatcgatgcagcctccacgtcgcacgttcccggctaggtacgtacatagtgatgtgactgtatagaaggcaagtcagagaaagtcttcaaagaagatgtgacatgagacctgggccagacgggcgacgagggacagcatcagcaaggacccctcagtgccaggcccccaggctcagtgggaaacaactgcccgtgagatggggctggggcgttgctggcggcgtgtattggtgttacctgggaaagttcttcctccttcttggtggcttggatcaaatatcacttctgcaagtcccattacgcccaggcagaaatggcttttccctcctcagggctcccttgctgttctacatgcttccctttgcgcacctgcgacgtaactcctggcttgtgtccatctcctggcaagactgggaaccccttcagggcaggtggggtccctgtgttggtcctctgtgctgtgacaccagcacagtgcctggcacacacaagatggctctgtaggtgtccagctgcttaatttcactcagaaggggacagagaacgtcagtcacccatattagcctctggctctcctgaagctggccgacgttcccagctgtctttccttcagagcctggagtgtgggtattgtggcatgcagaatctagagtgggtaccatggttgcctcctgcctgttctgatttccactgtgtgaaggaagcccgtgaccttggctgaagcagcctgtgctgctaccagctggttggtccgtgtcttcctgctgtggcaaataggaagagtaccaccatcatctgggccagtggtctggtttttatttttattagcaacaaatgcccttaagaagcagctgaacatgctggctaattagagccagaaagaacagcttagcagcaagtgcactaaaatggaaattgcacttggcctccactcagcgtgtgcaagtggtcagcactaaatagcgccatctactaggtctgtccctccggctacttgggagacactccacagccagctcctcctggcaggctgactgggatgccattctcctggaagccggggatcctgcaggggccaaacccacatggtttagtggccgaggcaggcacttgatagcctctgccctgacgacattcctgccactgcagaagggcctcttccgagctctgtggagcagagcctggggcttgaactgagcctgcacccatgtacgggactcaaggtgcatctctggatgggagatacacgtggccctctgcaggcatgccagggtttgcctctctgagaagtttgatggttctcctgtcccaggtgcctgtttagtaagcctgggactcagagaggggcagtagtgtcctaggcctgggtcaaggcacccacctggtggattgaggagggcagagggtcaggccaggtggcggatgagggaagcctgggggatccctgcattgagagagtgcagggattcttgatggcttgacagtggggaccctgtgaccaggctgagaattctgttgaataatgaaagcatttggcccactctctaaaatgcttatcgattatgatcaaaaatgatctttctttgagattattatgatcctgtggagggagactgtcaggtaagaattgtgaaagactttgcagtgtgccataaaaaggattactgagtgtctcatctagcgcccttcagggttatctgattcgatagggacccgcgctttccatcgtctttgggctacttatctctgtaaattgtagaaatcttatagtagtgcactttgagtaatgcaaatttcttttccaaagaaatgcaaataaatgcaaattttatcctgtagaatataaatatggctattgctctgcagatactgacccgttttgcatctatttataaattcatttttgcactatcaatatgttgtgggctgttcactttctcttttgatacagttgaaacgtcttactggttccctcataaattaatgacaactaaaatctttgatacatgttgattctatcgttgcattagagccgttattttaccttcttaaaaatttattctttcacatgagtgagtcggcattgcacagtgttagaaatggagattttcgtttaatgcaacagttgccaccagtttccacggcaaccttgatatttgggagaggccatcctagttctcaaactgagcctctgcgtgttttccttgggctggacaaaggcgtcccatggctgaaacagaagaatggtggccttctaccagttatcaagaaaaattaagtctttttcttatgatttttttttcaaccttaacacctgctgttgtatgtcttgtggtaaatgcttgcaggtaacaaacatattaaacattcagaatccttcattctactcagtcctacggttagttttttaataggatgagtgttcgtaattgtgattccctattataccttgtaatatttaaatttaattaaaatgtaaaatacatttgtactttttattattctagttatgcatgctgattaataaaaatttagaaatcccttaaagcacaaagaataaaaacgatcactacagtcccacatatgttgaaagccagccctgcacccaagcccttggtccctcctccagcccttcctccaggacttggctccctctttatttcctctctgtgttctgtcttcaaagctctccctctctcctggcttcttctgcctcaaaggactgagctctgctaattacctgcacctcctcacttctcacgcattctatctactcttctctcctgaggccatattgtcgttgttgtaaaggacagagccagtgagctccactgagtccacatcccctcagcttctctgcaagcaatgctcttgatcactctccccacacagacctccttgttcccaggacttggcttaagtctttctcttcattcttccttcttattttctcctctctatccattttctctgactcattgaaggctctatttcccctcctgcccctaaaatgttggcattccctgctttgtctcactcacacactggtcttcttatcacacatgcttttctagggatctcatgttagtccatggttcacctttgacccacacaccataagtccctcatgtgtatttctaacctagacctctctgctaagcctcagattcttgtaaccaaatgtcttccacacatctacacctccatgtcccagggcttatcagactccaactctaaaatagaactcatcatctgaccccaaagttgttcctcttccaagttagagataatgtccaggctgggcgcagtggctcacacctgtgttctcagtactttgggaggccgagtcaggaggatcacttgaggccaggagtttgagaccagcctgggcaacatagcaagaccccatatctacaaaaaattaaaaaattagccaggtgtggtggctcatgcctataatcccagctactcaggaggctaaggtgggaggatcacttgaacccaggagttcaaggctgcagtgagccgcgatcgcaccaaggcactccagcctgggagacagaatgagacttcatctcaaaaaaaaaaaaaaaaagagaaaaacataatgtaattcttgactccttcaccattaattctctccaacaaatcaatcaataaattttatagggtttacctcatgcatttttatcaaatccactgccctgcccttctttgttcctgccaccactgaccctaactggctgttgcccatcactgtgatccatggatctgggatcctcaaatccatcctcccttgagccaccagagcgagctcagtagtacaggaacctcactgagtggtttcccctgcctgaagccttccagaggatctgcagagaacccaccgctggggctgggcaggaaggcttcaggaagcctggtactgtagacatggcccatgtcctccctaggttgccagccctacttcttccgtatagaggttctcgttccctgaagaggggattctaggcttcttagcatggtagcagcactgtttactatctgaccaccccctgcctctccgatttatctccagccactcaccattctgctttccttacttcagcaacaaggcattcctccggattccctgggcacaccagatattcagtgccactgcacctttgctcaccgaatctgggaattctcgccctgatcctgtccccctctgcctttgcctgatcagctcttactcagcatctccttttaggcattgcctctggtctcaaggtgctaccccatctcctcccctaggggtgccacacccaccccctcccctgggagcgctgtccccatcccctcccttgggggcgctgtccttatctcttcctctacttgcgttgtccccatcccctcccctgggggcgctgaccccaacacctccctcctgagttgcctcagcagtgctgaatcaaccaatgggcaaacagcctttagggcaccagcaaaggcaagacagcaacactaatgcaactatctagaaggcaatcatttgaataatctttctactccaactacacgaagataccctcctgtgtcttcattcaggaggttgagggttctgagtttcgggtcttctgagggttgttttagtttgtgtttcgactgctagtattcttgaacccattctgccaagtcggttggctttgagcactttctctgctatgatctgttcattttctttgccccatttatctatccaaggccttagggattttttttttttctgtcatttgtaacaaggattttttcagtttgcttttaccattaatgtttgtatattactttctgacatacagaagtgtttgacttttacgtagttaaatctattgatgttttcctttgtcacttcattacttttgtgtttggatatttcaacactctcaagcctaaaatgagtattcttataggtttttgccttgtttataaaggtttaatttttaatatatttaactctctaatttttctggaatttaggtgtgttatatactctggcacactacttttcctttctttcaaatgatccattttcccaacatgatttattaaataatctatttatttatggtgtctccctctttttatattcagaggacctgtttatacaaaagtctgcttgtggattatttagttccattgattcattatctctttttctgccagttttatagtattttaattgctttacttccaaaaggtgttttaataactgataaaacaactctcttcaacttttcagaattttgttattacttgtcatcatttattcttccagaaaaaactgaaattattttgtttcaaaagtagtctcattgcatttttaatcatgttaaacctataaattgttttatgagaagtgacttcttagtaattctggttttccgtccagaaaataatatgcatccctatttattcagctgtttagtgaggtttgcaagtttatacccataggctgtatacttttttgtcaaggttgtcctgagattttgactcattgctactgtaaatagcaatttttccccatttcgtcttctaattagttattgtaggaacataggaaaaccactgatgtttagatatttattttccattcagccatattccatattcttttattattctaacgacttttccattgctcttctttgctttcaaggtagacgatcatatcttttccaaataatacaaatgtattgttttctttttgtttttcctatcttgctgtgttggttggaataattttaaataattggcatagtaatgtctcttgtgtttttcctgatctcagtggaatgtctactaggattttactgttatgtgtaatatagattgttttttattgagatataatttgtatgtaacaaaatgcagggagcttaagggagttttgacaaatatatacagccatatagcccacacctcaaacaaaatacaagtcatttacaatactccagaaagttcttcctggccctttctagtcagtctaaccccttcttctgacttctgtcaccatagattaggttttcttgtttttgaacttattggaaattgttacgggatctttggagtgtcgcttttccagccagaaacctctgtggctggtggcggttttgtccgagttctcgtcttgtatccaggaagaataaggttcacagacaaatggagggtgaggaagatgaagaggagctttattgagtgtccggacagcccagaggagccccgcagtgggtggctgctctctgtaggcaagtcgtcccatcgtctctgcagctctcagcagagaggaggcctggagtggaatttaggtgtgttatatacacctctgctggcagctcatcccgacaagtgttcagctgtcagcagagagaaggccctggagaggatagtagcttctctctgcggctggtcgtcccagcatctgcagctctcagcagagagaaggccttggagaggttgttcaatgtctgcagctctcagcagagggtagctcctctttacagctggtcctcctgtcatctgctcagctctggctgagcccagggtttttatggccttcagaggggaggaagtgcatgcggattggtcaatgggtgaccatgagtgggcctggaaaaggcaccacaagttcccactccagccagggggactggcagccctgcccccagcctccaggccctcactggcctgaaggtggggcctcaccggagacccaccttcttctgcccaggagtctgtctgcctcctgctgccattcatggcactcatgctcgccctgactttgcccccagatcagagtgggtgccaacagcagggagcagccaagcagtgagagcaggcacttccaagcctgcgagggcagggggtcttcctgggtccccaagagtgcaagaatgcctgagtctgcagccgcgggttttggcagctgcagctgtgcccaagagggcagggatcctgcctgctcccagcccgccaagagcacaaggaggctaggatctgcagccacgacttgggcagggctcctgcctgctccatggaatgggaggcccaggtctgcagccacggtttgggcatctgcagcggcaccccgggagctcccgccccaactcgtaaggggcagagcttccacttgtccccggctcctatgggctccttggagcaagcggccccggcagcacctccctgcaacagctggcatgatggcagcggcaggctgtctagagcagctggctgctgtcatcaaaaggaacatgatactgacttgaatgagcagttttgtttatcatgtaatacattccttccattcccacttcttaggattttttaaaattatgtaggaaaatgttttatttctaagcaaattattcttaaaataacaaaatattacatttagaaatacccctacgtttatgtgagagaattcagaagatcaatacgcttcagcttttgggaattcatgcattcccaaggccctgccccctggacaggtttcagagctgatgctctgagggacgtggtcttcatctatgactctaggttccccagcctcaaacctgaaataatgtacttttccttaactcagaaagaagccctgttttctatgaattaggagttaatcccatatcttcatgttttctaacaatgtgcgggaggaacaacacctccgtatcttccgcatcgctcgctgtcttccacgtggagttccgtgcagtcggcgtctccactgcctagggagtgctggcttctctgggtgaatgtgggagcttccttttgcaagtgtgccatccatgtgtccctttatgccttggctaccaggaagcccaaagctaacctgagtgtctaactgaagtacctcagtcattccaactgcttagaacatctccatctctttgcattcttctcctttatgagtttgattttgtttttgtttgtatgtatgtcattgtatcacccaattttatgcagattttcactttagaatatccttaagctctctttaaaaataggagatatctctccccaaacacacacacacacacgcacacacacatgtatcatgtcaccatactttaagggcaggctcatgtgaaatgagccatcgaccttctttctctcctttagtttctttctccccattcccttgggtacagagcacagtcagttcacgcaagtctgcaaattgcgcatccactccctcctgagagcattagacaccaggagataccaggaagagcgtgaggtccattttcgaggcaaagaacactcacaaaattaaatcacaaatccaagaatatacgagggggcgtcgggtagtatgtgatcgcttgccaggaaagtggatctgaggatcaagaccgtcagggaaggggggttccctgtgggcaggtgtgggcatggaggcccttggaggtggaccctgagcagaatgttcaaacggtcagtattcggatgccctggtgcctcggggcgggggaggctggtggccaaggactccgaggcttggatgcagggcagcaaaatgggagttcaggaaatttcccagtgagtgaattcgtaagagcagaaggatctttgagcaggagaagctggaggctggaggctgaaatggactgctttataaaaaaccattttctaactaataatgtatttttaagtacaaagtaatacatgctcattgaagctggagaaatagtagatgatgtataaagggagagttcttatctccccccaccatgagggagcactgctagcagcctcgggtgcatcattcctggctgaaaagggatgcctgcgagggacagagagggaccaaatgatgccagacccgagtcttgtacaacaaagagctgcacaaagctgggagctaggcaaggtggtgtgaaagcaagtttttagcaagattaacctggcagtggcctacagggagctgtctgtgaggctcagagagtgaaggaaagcaggaggctgagggcctggagcaggaaggtggtcattcccgaattgctgatggggtttccctgggaaggagggggcccaagatggcctagagccccaggcctggacgtggaagtaggaggcctgctgaggaaaccggtctgggaagagcatctgtgagcttgactagagcatgctgaggctgagatgatgttctggggttcaggttgcaatatcctccaggcagcttgtccttcctccagcatggaacgttctggtgcccccagcggcctgatgcttttttgtgcctctccgcctctgctttctgaagcacggcttggttttgtcagctgctgggccaagactagcttttggagcacgttctctgagtcccagtgcctctcctgagcccctccccagcatctttgcaggagaggttcttcctccacaaagagaatctctgagctgcacggctgggttggttcttcccctgccacaggtgccttttcatgtagggaacccgtcagccgtctccacgccgctctccatgaaagctgctcctggctgtcaccgcacaatctgttcaacatctccatcccctgttgctattatggacttaaaagctgatgggcgttgtgctgttttgcttgccaaaatggcgaagagactttgttcttcatgcttcaaatattttaatactgtctttgaaacacacctcacacaggcgttttctaatggcctcggacttttcggggagcatttcatattttagctcgtctttctttgggcttttgctttttaagcctcccatgcatagcatttgtccgcattttaataaatgcacatctagggagacagtacctgtcagaggtgtttatgaaggggggaccatggctgtgttgggggcccagagggggctgaggtctgcttctgcgttcacttcctgttagcttcctgccctcaccaagacgagatgggggtcagagagcccagggtggctcccacatccttggttggtcctcaccttctggaatcctctggcccaggctgtcccacaggatggtgtaacttcctgcgtgggagtgcctgtggtgaccgcacggtgcggaatacagcgtggctcccatagcttgagctccaggaggtcaggccagcttccatctggagaggggcccctgctccacccactgcctgccagctatctccagcctgttgcaggggtttgccaccattaggattggtctcccacccaagatcgagttccccaagcttctggatatatccagtcaccatttccaacctcctgccccttctctggagggaatggcttctccagcacataggcccacatctcccggtgagcatgtgtctccccttgggtccaggtcaaagtctggcctcggtgggccacctttggtgtcttgacctgaggctctggaggccacagtgccctggatgtaagcagtctacggcctcaaagcctgttgtgggatcatttgggctgcatccattagctgggggtttcatgtatttctaaatgtctcagctctttagttcttaactttttaagacaaaaacttggtgcattttaatcctgagcttgtagacctttatggtttctctaaagacatatacaacagagaaagtcttcccaaagggaaggatatcaaaatgtatttatactgtccactctgtggtgttttgttttaggtagaaagtatccatctacttcgtactctttcttccccctgttctatgaagtctttgtctggcctaagcctctttctttctcaggcgtcctcagtggtttatccctgtcactcctgtggcctctgtcttctcttccagggttgccaccacgaacaggtctctctcacaatgttcttttcaaattgtgtttgtcttagatgtgtttcatgcctgaatagagtcacattcatctgggggccctcgcagtcccctgcaggagtacagtctgttctacaaatgtatttaccagcttaagcttggaattctacagtgccactaaaaattatgttccttttgtcactgtcagagtttttaactagaatcctgcagaaaacactttatataacctttgcataacgagttattatctatgcttctctcttagtgcccagatgagctctgactagaccaagagaagctttttcgtagccctggctgtgcccgtctctgagtctgggctccagccggaggggtgagtggctcagagcaggagtgggttccgaagcctcaccccaagcagtttaactgcatggaggctgaaattctttgttgtctgggctttcaaaactgtgttatttctgttcatgtgacgacagtaatttaagggcgctttaatatagaggaggaaatgtcattccttccaccaaactaatctcagtaactcactgagctgaacactaagatacaggtcggagtctccaaaaacgtgaaagtaattacccaaagcattgaacaacaatgagaatggtttaaaaaacaagaactgcagtatggacctatgcctgtttcatttcagttccttcccatactctttattttccaaaaattttaagtgaacttctatcattttttatggtataaataatgtacatacacaaacatatatatacacaaatacatatacacacaaaatatacataaaatttaccattttttacccctttaaggtggaaaaaaatctggttgggagatggatatctggttctcaggggtggatccaggttttgttgtgtaatttcggagctcttgttaagaaaaataatacaaaattgaaagagcctctgctgggacccggggagggcccgatgtgatgggagccaagagctccaggtcgctctgttcatctttcttctggggttggcatgagcttccttcccagagggcactgggcagtgctgtttgcagctcatggagccctagccctttgctactgctccaccccatgggcatcaggccccccaacactgaggagttcagcatgagccatgtctgggacagctcattctccaggctctagcctcaaggaggaatcccagtggctttaaccccagctctctgacagccctcactcttgtgtgcctgggcacacgcatgtggacacatacacacagatctgctcttctcatgcaaaacacatgaccttccactgcaggttccacgcagggcctcctaacctgcccctcccctgcctgctccagaccaaccactcatggtaggtctttcttttttcttactaaacttggtgttttagagcagtttggagcttacagaactgtttcaaagatggacccgccacccagcttcccctgtgacactagtatggtgcctttgtccattcattgagcccacagtgacaccttattgttcactgcagtcactgcccccttccgagctccgcagtctctccctgatgacgtctttcccgctctgttgcaggatcccgtccaggatctgttttgtagaacgtcactcaatcgggatttgtctgatgttcttctcttagctagaccaggattatggggctttgggaagaagaccagggaggtaaagcgccattctcatcacatcacatcacatcaagggtgaaccctgtcaacgtgactcatcactgctgatgcttgctagaccttccagacacggggaatttaacctgatctgtgcctagggctagactctcagcagcacctgtcttgagtgtgcagtgccaccctaaggaatgcagcctgcttatactcagtgtctagagagacagtctgttgtggtggaggggagcctctgattagcgtgaagcctccccacttagctccatgttgggggccctcgcgggcattgctccaagacaagctcatcttctccttcatctctgtgaccaagcccttaactttgcagctttaaatcctaggcaacaatgagatgtggagtttgcacaaggagcattaatggagagtggagagaccctgagccttcactccatccatttctcatgtggaaatgaagatcattttatccccctcaaggttactgtgaaagttgaacgtggacacatacagccatcagcagtagctccaagagtgggtgcttttgttccacaaacacttattgagctcctactgtgtgtcaggcactcttctagttgctgaggaccaaacagggaataaaatagatcccaagggagctcagccagtggataactcttttcatggatcaccatgattattgtgagctaatacttatatttcaggagattcaacatgcagactgttgtagcaaaaacagtagtagaattcaaattagaaaaataataaatttgcacctaatttttccacttaactgtaacctgggggaactatccttattttaatgaaagcatgctcattctcattcatataaaaatgcaaagtaaagcatcaaccaaattacatttttcacccaccaatagacaattacaacagttataaaatgctccatgctggcaatgctatgacaaaaatagacactttctaagaactttttattattagaagtactaaatacacacaaaaatatagctccaacaaccagtaacattttaaccatatttatttcatctgttcctcactttccttttgctagagtgttttaaaggaaattccagaaattatgtcaattcatccctaagtgatcagtaagcagttcaaaaagttgattacacctaacaaaattaatagtagtcattaatatcacctgctattcagtctatatttaattttccctaagtgtctaaaaagaaaggtctttttacacttgcatcaggatccaaacatggtccatccatcgtactggttgttttgtgtctcactgtgtcttcatccacaaaacccccttctacctccccgcttcctgcttgggcagagtccatgacagttgtcctatagaaggccccaagtcctagattaggattctggtaattctggtgtttaattggttcctgcacctttttttttttttttttttttttttgagacggagtcttgctgtgtcaccaggctgtagtgcagtggcttcatcttggctcactgcaacctccatctcctgggttcaagcgattctcctgcctcagcctcccaagtagctgggaatacaggtgcatgacaccacgcctggctaattttttgtatttttagtagagacagggttttaccatgttggccaggatggtcttgatctcttgacgtcgtgatccacctgcctcggcctcccaaagtgctgggattactgcaccttctttattgcctggagactggatttgagctgccttccgtttccgggtagtttcttttcttatgtgagtgtgtgtgtgtgtgtgtgtgtgtgtgtgtgtgtgtgtgtgtgttaatacttcttgggtattgcaggtacttcctgctgcatcacccaaggaggcacatgacaccagctgccccgcttctggtgatgttgagatggagccactctaggtagccgccacctgtgaaattcagcagaagttatttaaacttccctgagtcttggtttcctggagtgaaaaagaggcgcagtaagacctcctccccaagcgggtttctgtggctacagacccgaaagcacttccaggcggcaaactgccacagaaatattatgtattaataatatgatgatgcttttggcaattaaggaaaatctccctgctgggcttggtggttcactcctgtaatctcaacactttgggaggccaaggcagacagattgcttgagtccaggtgttcaagacaagcctgagccacgtggcgaaatcccgtctctacaaaaaatacaaaaattagccgggcacggtggcacacacctgtggtcccagcctgggggatggaatgtattgtgggaggtaggggtggaaaagaacatgactaaggcaggaggatcgcttgaacccaggagcggaggttgcagtgagccgagattgcgccactgcactccagcctggatgacaaagcgggaccctgtctcaaaaaagaaaagaaaaaaataccttctttcaaaaaacatgttcctccttcagacacctttaattgagaaactgataatgctcttttttattggaaaaagcttccagtacattttcaaagattggaaaccaccagctttttcaaccaacagctaaagcggggttgtgattcattcctcgtgattctcggccttaccactaagaaaacgaaagtgtagtgatgccctctgtagaacggagcctggctggggaagtgtaaaatccctcagtcttctagatctgagagtccctgaaggggaggaaaaaaggtattaaacgtttatgggatggtttcctttatcaaaagattcttctacctcccagcctccaagacaagcatcctgtggccctcttctgtgaggaccggctgggggcggacccttttaaagggatgttgcttattgattgtcaggaacagacttgctatttaaattttaacagttctcagcaagcttgcaattccagagcttgagaatgagcaaatccttcccaaaacaatttttttttgtatgaatcagggtgcccagagatggatcagttcatttgtattagttttcactttaatctctcttccagccagaccttttattttctagtgaaagaggaaaaagaataaagaaagaattcctatagctgcagcaggactgggcaggccccgagatgcagaggtaattaataggccctgttgtcaaatcaaaccaggcagcagactctgaaccctgaggctggggttctggactttcaggagctgtttacactcggagtgaacaaacagccaggatcaggcagggccaggctggcgggatggggccgagggcgggaaagcggcgtctccaggcttgctctgcctctcccgcagtctgattaatcgcctcagtcacctggtttcaacagttgtcctcttgactgtctctttctgaaacgatgtttgttcactgtgcctgacggagcaggtgaatggctgactgctagacactgtgatgtctgaaggaagaaagggatggacgaagagctttactgagtccagtatcagtcaagcttcctgagggaaaagatggcgttcctgaatgagagcaatcaaggaggaagttttagaaggggaatgtttgcagaggtgcgggtggaggggaaccactgttaccgggggctggtagcctcagagcgggtttcactctaaggttcaagagcccgaggcagttgcagaaccccagaaggagagattatgtagggtggctgcttggaaaagagggggacccaggtagccccaggcagcctcccagtgaggaagaaagagccttacatttgctcccctcatctacaggaagcctcggggcaggagtcccgaggacagagctggatagggagggcggagcttggatctagggagagcaagctgtccagcaccctgggccaagcttacagctagatgctttcaatgtatgtgatttcatactcggggagtcttgggggttatatattatcaccccatcttttcattatttcctttaatttgttttttgagacagagtcttgctctgtcgcccaggctggagtccagtggcgcggtctcgactccctacaacctccgcctcccgggtttcagcaattctctgtctcagcctcctgagtagctgcgattacaggcacctgccaccacgcccggctaatttttttgtatttttagtagaggcggggtttcaccgtcttggccaggctggtcttgaactcctgacctcgtgatccacctgcctcagcctccaaaagtgcagggattacaggcattgttttaatctttaatggtagtgaaacacacataaaaaatccatcatgttcaccatttgtaagtgcacggctcagtggcattaaacacattcacactgttctgccaccgtcaccaccatccttctctagagctcttttcatgttgcaaaacttctgcaccactaaacagtcgctccccgttgccctttcccctgctcctcctactttctgtctctgtgaatttgttctagatgtctcatgcaagtggaatcatacagtatttgtctttttgtgacttatttcatgtagtatactgtcctcaaggttcatccatgttccgccatgtgtcctaatttccttcctttaagaagctgaatagtagacattgtatggacagatcgtatttgtttacccattcatccatcggtgggcagttgggtttgttaggaataacgctcaaaatcctaaggaaagtgaacacacgaacaaaagattcttagcaaagcaattttacttctgcgcagaggggtgcctccttggccagtcgccatgacagcacacctgaacaaaggggcacgagagcctttattcctgacgcaagtcctgcccctgtaccctttccccattggccggggtcgggtcatacaatctaaactaatcccggttggctgaacctttgattttttttagataaggtgggcacgtaaaagaaagcgaagaggaaaggggaaggggtgttctgtaatgaactagaaagttagtcctctttccaaataaaggaaggaatgtgagctgctactgataatgcctggtactgtggcatgcctgggcatctaacaaaggcaaaaaggaaaaaaagggaaagggcagcagggggaagggtactataaattaaagaataaaagattgattgggttctttgaagagaaacctcatcatatccctcaggttgcttctaccttttggctactgtgaataaagctgctttgaacccaggtatgcacatatctcttcgaacccctcctttctgttcctttgagtgtatactgagaagcagaattgctggattctatggtaattctgtcttaattttttgaagagccaccatactgttgtctgtagcggctataccattttatattcagaacaaccgcgaaatggggcggaatttcttcacatccttcccaacacctgttattttctgtttgtgtgtatgtgttttcttttcataatagccaccctagtgggtattagatgcaatatcattgtggttctgttttgtccactgttttcacggaagttcaaacaaaactgaacacccttaagtgggagagctcgtagtcagctgtggtctccatgcttctttcttctacataccagttctcttcagaatgagaacggtatttccatggaagctggacttggcacgaaggggccctgccttctaccaaccgagtctggttgccctgatactgggaatggcctttcgtcttctgcattgacaaatggctgttttctgtaagggagactgcttagcaaaccagatcaccatgagctgcatgatacaagtggaagggttttaggctcccagagtaaaaagggaagttgctgtgagttcttctgtaggtaactgggaatgcgcacattttgtttttaaaggagacacacagagagggggatcctcatcagctgcccattatccatgtcactggaaatcaaaagccaagaacgctgaaatgcccagctggtggcgaagactgcgttcccagaaagccatttttggaagcagcttgatttgaaataattaaaaagatcccatcttcatcgccaactggcttcatgcttcagagcagcttaactttgtgttaaggaatccagtgagcagattctgaattagtgatagacacctctgtgtgaggcaacagaagtttcctttgagagtctcattttcattttggagcaatttatggccactgcttggtgattggtaaggagctggagtgcatttccaatgagctcgcaggcgcagacttacgaatccccgcggttggggctgcaggtttttggagaagcggctgggattttatgtgtggatgctgacacgcagctggtactgtctgcaggctctgcctagcccaacactatggtggaaagcatgtgccacctctttctgaccatctctaatgtgggtgaaagggaccttagcgccacttcaggtcagcgagacagctcgatttccagaagaatttcccccacccaggttttacttcgctagtaacttgaaaattcagttcaggcatcatcacaattcagaatgggaaccgacagcggatgctggaagtcactgccaagactttgttcattccagggcatcagtctacaaaatgactgggctgaaaagcctgtttaaactctgcaaaaaatccacgcaagggtgtaggatctccagcagaaccttcggaagccttgccggcaagagtgcatttggctggcagagtccctcttgcacacctgctggaaagctgggtgggaagatattctaagctcgctgtgaatttcattacgcctctctccagccaaagccactcaagggtgtggtggtgtaatgggcctgccacgcagatgggctgcgaaatacacagcccatctgtctttatcatgctcatttcctcttttattaaaatgttaatgaatatagtttttatttatcattcagtgacatgtgcagcatccttttctgggagacaaatctgcaatctgcctaaccatgtgagccgacggagaactttctccccttacatactgaacacaggaattagggacgttttggttccttttaaaccgccgtatgcaggttgcacaaaaaaatccttttgctcattgatggcggcaccggggaagttgcctttctggcttgtaagttactagccacatggccagagcctcagtttccacacctgctaaatgggataagctttccttctcctagagctgtcctgctaagcaaatgagatgttccctgagaaagcctttgcattcacctcttattattcagacatgataagcctgtgggcttgaattcgttttcttcattctttcagactctccatggaaggtgcatctgtcaaacgttggccctgagatgacaggcgtcaccgtgagtggcctgactccggctcgtacctatcaattccgggtgtgcgcggtgaatgaagtgggcaggggccagtacagcgccgagacaagcaggtgcgtgaatcccgccccaggtgggggtgtggaacagccgggggcctgaatgccaaagagaagcatcacattatgtggtggaattgatcacagcaacccgctggcttccctcagggagacgggacaaaccgtgagcagaaaagcctgtcgcaaagagggaaagacaggcccacgcagacttagctgggccttccttcattgctttgaggcaggttccttggatttttcctgtggcgatctggctgtgcctacataaatcgctcctgacagcacagccctctgtgtacaggaaattcagagctcacatgttttccgtgttctttgtccaccccactgccgggtggacgctgatgccacagtcttagcaagtcaacacctagcatgctgttaagggaagctgtctctgcagaggcgtcgcattcctgagcggtcttcacgctctcccatccctgcgagggccacctctgaaaaatctcattcggaggtgacatgggaaaatggcttcatcacatttcagcacaccttccccaaccaacctgagctttcagtgggcttgacttgtagaacagctgagctgtaaatgcctttctttttttttcttcaaaatgtgggagtttgatatgagaaatattgaaagagccggagaaaacagtttgggaggagtctgagacggcaggccgacgagcggacgcattcaggcttgcagtctttctaaagggctgaggtgctggggttattcacacagaacaaagtcacctccacctttcctcgttgcttggttaactgattttctattatgttgatttgtggtaactgtttctcacgtcctttcagtttcattggctgtgtgttttgcttttcctgaaacccgatttttgtgaatagtcaggctcaagattcagcaagatagatgaaatgcaaatgggcccccgctgtttctggtactcatctctcttgttcctacccgtcttttatttataggttgatgctacctgaagaaccacccagtgctcccccgaaaaatatagtggccagtgggcggactaatcagtccattatggtccagtggcagccacccccagaaacagagcacaacggggtgttgcgtggatacatcctcaggcaagtgccctgtgattggccatctttaggccgccattagagttgagcgtcgatttcacagagggttgcaaactctaatgtctgtaagagccaaacaggaaccaaaggagtcaggccaggtgtgagatgttagggagtggtggagactgtggcaaactggagtgcacaggccaacgtgggcagccgtgcagagacattctgtgcatatctgaccataaatgacacacacaaaactggtgtcagggtagcattttggcaggagaatggagggggtattaggggttggaagcaaggtatattgttcaatgtgaagctttttttttttttttttttttttttttttttttttttttttttgatggagtttctctcttgttgcccaggctggagtgcagtggcacaatcttggctcaatgcaacttccgctgcctgggttcaagcaattctcctgcctcagcctcccgagtagctgggattacaggcatgtgccaccacacctggctaatttttgcatttttggtagagacagggtttcaccatggtgaccaagctggtctcaaactcctgacctcaggtgacctgtcctcctcagcctcccaatcctcagctgggattacaggcgtgaggcactgcacctggcctcattgtaggtcttttgattccatttaagttttcaaccaagggcatgtgttgttcaatacagtaattttaaattaagaataattaatttcatgtaattattagccagttgtcaccatgctggtatgttgcttgctatttccagaaatccaaagatctagctttgtacctgaaacctcccaacttttagatgttggaaatgaaatcaatatatttggaaacaaagggcagggctaacacacacttctgcaggccagatgtggctgaagggtagccagtgtgctgtctttgctttataaaggacagttaggcttctagaattattgggaacactgtatctgaacttgtctgtgtttgagagaagaaacctcctttgccaaaactgctaattttaaaattgcactgaacgcgatcattgcagtagcctgttgacacaagtaaaagcaaaagtaaagcagaattgcataataattattaaatctcttctaatagattgcaccactgtggacatatttgttcattttaccagtgatattgggacaagaacagtgggtatccgcttattcccttcctgggctcgttccaagtgtgtgatcagtaaacagtggctaacaaaggtcttcagcagacagatgtaatttcttagataaatgtgagaaattgggaaatgttgcatcttcagcttcattatccttgtgtatgaagggcaacgccttccctgtatatatgtgtatagccatccattcatcatttaatatgtgtttttctatgtgcctggactatttgcctgtcaaaaccaatttgccgctgtttacaagtttttcctccagcgtcgggattctcttctaaatgtaagccagaccgtgacccacctgaagtggtttaaatgggccatccccaggggtacacaaatagctccaatcaatagcaaggccccttttgtctcgaggctccaactgtccttcctcatttcaaagaagggggaagaggagcttgcagttctgtcccctcggggtgggggccgcaggctctggttcctgttgatcccctgggacagttcctaattgcctgaccacctccgctccagaaaacagccccgtgtccccgccgcctgcggccgagggctcctgtggcactgctgctcttgcccctgccttagccattacctctcattctgcacccatccactaatgagaataattggctgccctctgtacccagcagcacaggcctgtcatccctctgcctctgcctttcttcagcatgtgcaggaagagtttccttaggctgaagccgtcaagtaaggactttaaaagtcatcccacagaaccaggcccggggcacagagtttaataataaaacctctctgatgttacgaggccacttcggggactgcacatttctctgttttgtgggattactactgttaaaaggattttctgtgatggggtcagtagagttgggtgctggagatgagggcatcttctgtatttgcaggagcttaaatccagaaagctccaagatgagggtgcagtaccctaggcctgtgaatatcaaagttttcagaaatgaaagagccatgccaaagtgaatttgcttaaaaacatttccgcataatcctctggtctgcacatcagctctctgtttgcgagtgtgtatcctccagggcacagtctctgtgtcagatccgaggcacaatgcaaggaaagcaaagagaaataaatcacttccgtggctccagccataagaagtagttaggacgcgtgtgcagtaataaaatatttataataatagggagggtgtttctttgagaggagcataggggttatgtcctttataaacgttctcctgtttatttttgtataaaaaatcatcttgttctggctgagatggtctcctgggcaacatatcctaccagcaagaggaggctgccctgcacttccgttattgactgtgaccttcttagacatcctgtgactatcacaaaagcacccggagccactggtcagaatgggccaacgtgactgttccggaggggagcgcaggctctttggaagatgtaaattctgcagtttgttattcacagtgctgttaagagtggccccagagaagttgggtggctcatgcaggtgtagttccttataactcatagttatctctaccatacttctcggtagaagagcagtgtttaaaaatgtatatatatttagggagtgctttacaccttcacatctcttttacattcagtgtctcctttgactcttgcaacaagaatggaaatgctactgtcgtacccaccttaaagaggtggaaaccaaggctcagagaagtttggaattttcccaacaccacccagcttctgagtggccgttgagcaaagtcttccgatgctggttcctcagctcttccctggaatgtgcattgtgtagcgttgggtccacatgaggaatccttcttaaacggcatcctcattctgtcatagtgattacagatggtgcttggtgccagcatgcccaggctactcaggtgcatggtgtgggcacagagccagtttctaccttttcccaaatggctgtctcagtcccatttattttaagcgttcatcttttgtagatggtgaatgtaagtggaaatacctgtcacacaggtgaatccatgccaagcctttctcccagtggcccaccgccttgaggaccatcatgctacgtcggtgatctgaacaccacctgagaattgcacgtgtacttgcttggtgcaggtcgttcagtaaaggagtcagtgatggacacactaggaagccaaaacatggtttgataacttgactttcatttttgcccatcacggaataacgctgtcccttccctgagtctcccaccaggcaagcccagaggccacttgctcctttcaggcaagagacagaaggaggcccggtaccttcttgctactcaagggccatctgcttatcatcatttgttttctatcaaacaggccccaccaagtgtacatggtcggcggcaagagggaacgggagaatgctctcggaaactcctgatttttgtgaagaaccttgtgtgaccatttctcgatttcctcacttcattttcaagccctccttctcttgggaaagttgttttacattttagggcctgaatttctgggtttcttctctgcttcggtgtcagcagccttactgatgttccggtccacgcgtgtctgtctcagctccttccccttcgtgctcaggtgccctgcccgcgtgggaccacacaggtaatggacatggaatctgcagaaccacagagctcagagatcagcgtcctggaggagcctgaagatttccacatgccgtgaaaagccagcggatttgctgccactcaagtgtgggactgtgaggcaggagccacttctgggatagaaattagaggcttttggaagctgcaggatgacagggcagtcactcctactgggcatgcccctggctttacccagaggggctgatccaggaaagctcaataaattacctgagtcagttcagtgcattaacttctatagactgaatcatggagaaacatatgctaatcaaaataatacaatgcaaatcttctcacagtacacacagcaatttcctaatttatacaccctaagtcctgagttgtgtacattatctttttcataaacactactttaaatttccacctttagtatgctaagaacatagtacccaagcactcacagaggtcttctacaaagcaatttgtcatagttagtactggactagtattttagaaatttcaacaccttttcaaagccgctgattcttgttctgggatacacttggacaaacctgcaattcctaaatggagctctgtccctggacaccacaaggccgtgtgctgcttgcttctggaagtctccccacgtttcagactcacaagaggaaagtgtttctcaaactgatttacagcaactccccgatggaaatcatgtctggaatttttcgtcctaagtcactgtagtccctagacgagttacatgtaaaaagctgtaattttttcttaaccgttatgtagttgaaatgtcagttccattttgccttgagcttataatcactgtgagattagagcacacttttcaaaatcatcgagttgggaaatagtattgtttagggctgacctctcagctctgctcttgattatttacttccatttccccctaaccctgcggaataactgcgggtaaacaccgttcctgggtccagttatttccttatcgtgatgggcttccttcgtggcgcaggtaccgcctggctggccttcccggagagtaccagcagcggaacatcaccagcccggaggtgaactactgcctggtgacagacctgatcatctggacacagtatgagatacaggtggcggcgtacaacggggccggtctgggcgtcttcagcagggcagtgaccgagtacaccttgcagggaggtaagcttgtctccaaaaccacgaggtggcgggatctttgccggggaatgggatttgcaaggtttgactggagtacgttagaaagaaaaacagagaatccagtcccctagggagcgtttacaagaaaattcatcacgtatttaatgggatctctccagctattcctcaatgaaaacagaaccgtagacaggagacaaataatattccaactgctttttcagtgactaaggaagtttctgtacacgccttttgacgggtgcatctagtcttgaaaagtctgtggaactggatttttctaaatggaatgattgtaggttttcacaggaaagctggctgtggagttctgtgtgatactgtgagtgtttttcaaagagcacgatgattattcacagttttatttttaacgacgtaacgtgattactggtaatcgaatttgcaacgtggtactttttttggttgtgcttttcagttatacaagcaaacaatctactaggtcaataaaaactgcccccgacccctggaaaaattgaccagacataaacgtcatgaagccagtggttcttaaatatccgtggtgagatccgggtgcggcgtggcaggctttccacagcatctggttcctccgctgttttctgaaagattcagatctcagccccaggaggagccagcattgggagatctcctccacatctgcatttcactgttactgctcttagcaggaataaacagaccctctcccaacacagcctcatttgtcctacagcagcccaaatccttgcccagggaagtaatttttctactgagtctaaaatcctttttcactctgcgatttatgccctcgcctgattcacaggtgtgattttatttgcttaggcatttttattgctaccagaccttgacctttttcagatgacaaggtttctgactgcccaattctctccccaaatcatgcctgagacctaatgttccttgatattacatgcttttattatcatcccgtattgactggctgtctgttgtcatctgtaagtccataaatcctcctttataaattaagtgcagtcagttctgcctgcacagcgactagaagaaatatttaaaatgcaggacagccaggaaggacctgtccatatgcaagtaattcttgattactcatttgaaaaggaaaatggctgaaaacctggacagttaacatttgctttaactggtctatttaataaattaacaataaacttagaaacacttaaaaagactcatattgctattagtaatcccttattactattaactgtgactgtttcattttatttccggtgcatttgagttctgcatggggcagagggaagtggatctccacctaattgagaagggctttgaggctttggactctggcttttattcagttggcagtggggaaccatgaaaggcttaagatctgtgagtgacatgagcaaaatgctgcattaggggcggaatctgtgcgtgggtgtgcagggaatgtaggaggcggggagcagagaatggcagcagggactctagagacaaaaaaaatgaattgatgagtgtcctctagctccaaaggctggcaatgagaagagatagggatgtaagtttaggtgggacgccattgttttcaaaacagctctcatggattccagggttgtgccttccagcaaccctgaaaacgaatgcagtttcggccccacaagcacctcccagtgccttctgtacaacagggctgggtataaaaacaggaacaggcccagtgcctcctgtacagtgggactgggtataaaaacaggaacagagcccagacccttcctcaaagtgcagacagtttataggatacagcagggcaagtttcattttcagacacctgttcataggaagctgaacattagctaactggaatttagttggtcagaaatcacacaggccacaaaggcagaaccagcactgacatccaggcttccaagacaagactgctgttctctgagtgacatcagctgcctctgacgtcagtaggacttgagatttcagaggagatttggcgagggactgtgcttagctagtgggctggggtgcagggttcccctaagatagtggcacagtgggtggggtcccgcctccatgtccaagtagtcttctggatggggaaattactaaattatgcattgctctgggaatgaactttttcccatatgtgatgagaacctgacttcgattggtccaaatctggttcatcatctatacttaaaaaaaaaaaaatgctcttcatgagtgaacgttagtggataatgctgcacgtgcagtttcccatctgcagctcggcttctgtagcagcaccatccttccctcacttgggtgtttgacattgggggttggtatacagagcccctcatgggtctcggagggcccagcagacacagtcgtaattcctgtcttcgtgtcttcttcatgtcttctgcctcggcactcctgggagcacccttatacagatgtggatggccctcccttgttcccttttaagcctggtgtggaaacacaggtggccccgtcctccctttgagggactcagccctccctctctggatgtctcggactcccgtgtgctcagtgggatggtaaatgcctctggggaatctccctggagcttgctgggattgggaaggtcatgtcatgcttttcttccagaccctgactccaaccctaaacctattcctgggccacgaggatgaacatctcaggcttgtgacagtctcggagacgccgggcaccacccacctgacccttctttgttcgagggacatgcttgagtcccaggataaattgggggctgataacagttactggccagagtgttaggacactatcccttggacgtggctggggtcaggcacgtggcaggcagcaggaagggtggtccatggcctgggggacatggctggcttggctggctgcacagccttgatgcctcagtgtagtcaaatgcacttatccctctgtgctattcaaggacctcccagccagccacgctgccgctgaacagaatgaagcgagcgtatgaattctgtcctgaatccacgttcccctctgtgacagtacattgctaggagatgacatcagaccaccagtctagaaagagctggggaggtgaagggaagacgggggcaatgcttgcctggctctggaggggaagatgcaatgaatgggacagaaagggatctgcctagaaggtggcacatgaggaagcagagtgacaagagggactgtgaatgcatcagggggacagtggtgggggcgcagtgagcgtgacgtttcacacacacgtgtatattcacacatctttctggatatgtgacccccagaaagagcccttcctgggagtccatccaggcctcactccatatttactactaatgtgccttcaagaagcacctgtgcccgttctgagcctgcagttttcatttgtgaaactgtggcatttacacctgtcctgactcaaagggcactgtgaagaggagatgagatactacgtgtgaaaaggctttcaaaacaaggagacatcacacacatgccagcactgtggctttgtctgtattcgtttttccactgtgatgaagagtgtctactagggtatttgaatgcttccataggggccattacactggaagagatctgggggtcatctccctactgacagtaacatcaaacagagacactcaagaattgatgtgagcacctgcagtttgtgcagagttgtgggaagggccctgaccccgagggtagggaagatatctggtgtgtcatcatccttggggacctgcagtctggccctggaggtgagactgtcattcatgaaataagagcaggaagtagaaaagaaatcagcctcactcatgcacggtcacccctcatctatccacagatcggggtactgggcgtgctttgaagagtcctcagtcagcacccagaggaacgggctatggacacgagggttgtgatccacgtggcggggacacctcagagtttgtggctatctgtgttgcttaggaatagtgtctggctgctagaaacagacccacagtgacaggagcttaaacaagatagagctgtgtttttacttttctcacatcagggggttgggcagtaggtggggcagtcatagcagcagctccgaggtcatcagagattcagggttctttgtctttttggctgccactttagcacgtgcctcaggtcacaagcctgctgctgcagtgccagccattgcgtccccactctagaaggcaacaaggagaaagcctcagggttgtgccttgggaacgagtatgcccacctttaaggaactttcttagaagttccatttgctgctgactctgcttacaattcctggaattctctccttgtggcagaggctggcaacgtggccttccagctgggcacatatctgtcccttgttaaggaaggaaggggaagctcacagcttctgcctcactttctaagtgagatgaaatctgacaatgggctcctggcttgcctcacacagaatgaaaactgcaaaagcacaggtccttcaggccatgacttcccacccatcccctgagggctcctcagcctcaggcccccagctccatggggctgtttgggcattaagtgctaaatgcttatttgctgctgggagccccacttaggggcttgaagtacccccagctattagcactgattgtcaaggcagcctaggggcttgagcaggtccttgaagctgaaaagggagtaattaaaacgcctgtaaactgaaagggaaagcataactcataaaattaattatttgtcggcataatttgggaaattattggaatgtctacaaagagaattcgacagcatgtcagagagcatgcagaaggcaggaaatgcccagccaggagaagaaggaagccctaggccagccagcctcatttctcctcctcccttcagtgagtggcagcttgaggtatccggggaaatgagatgtaattcatcttgactttaataaggcccttggattgagctcctcctgagaaagtatccgaatgcccgggaaagatggtgcagcgtgcgctaccattaggcgggtgtggaacttgctaggctgccgtctcaaagagaactcagcagtgacacagcatatgcctgggctgagggagggaagggcatgcaggctgccctggttggcacaagcagcaggcagggagcaatggagaagctgtctgctgcagggggaggtagcagctcattcttctagagcatacatttttggtctcaaatgtgtttccttccaggcaactccttaaggaagatcagcagtatgtagtgagcacagtgcgatgttgaccccaccactcactggccacactcctcgtttttcttttctttctttctttctttttttttttttttgagacagagtcttgctctgtctcccaggctggagtgcagtggcgcgatctcggctcactgcaagctccacctcctgggttcacgccgttctcctgcctcagcctcccaagtagctgggaccacaggcgcccgccaacatgccccgctaattttttttgtattttattagagacggggtttcgccgtgttacccaggatggtctcgatctcctgacctcgtgatccgcctgcctcggcctcccaaagtgctgggattacaggtgtgagccaacacgcccggcccttgtttttcttttcaatcccatttatggctcagatatatttacaatgcatggtttgtccactccagttcttcgcaagctctcggcatgggctagcaccttggacacatggggattacttaatataaactttctaactttcctgacttttcttatcccccttcatccaccatcccccattatcttgtcggccaatcccatttaatagattttattaacggtgactccatgaccttttcagctcaaggcattttaaaatgggacatattaacttacaaattgagcagcaaagctctaatacagtttcagccaagtgaactttctgaggggtgagaggaaaggttggtgctctcacagaagctgtggcctgaaactccaacagactcagttccgcatatcaaatttccatgatgattacccacgatgaaatggaaaataactgaaatttactcgagaattttaaatttaaataaccgaaatggactcagaaatcaatacgcttttggtgtcgagtggaaaaaattccgcggagtgtaagttgtgtataaccgagtgcccagtataattagaaacatttttcttactgccagtgtttacttcagcaactttctaatagtgtagcttgggagggagagtactatagtcatttgaagcaatcagtagttcatatcgatgctgactcgctgtttggctcacaaattcagtttttgttagaaattgttcaaataatgatgaaagacacaggaagaaagaatgtggctgtgaagttttcaggtgaacctgagtgtggaacactggacactgccaggatataaaatgtaatcgattacagttttgtcctaaaacaagcctgtatggattagcaaactccttctatacattttttgaattcatccattaagacgcagatgttggtttttctagaaggggtccagagacaaattatgctataaatcatcattctgagcacaccaagattttcctttttttctggttttatttctttatcatttttcttcttgtaacaggtatatttgtgctgtaatgatttattctggtttcagaacattaccttataatgaaagagaaatatttcatattttaaaagaaatggaaaaaacatttggttatccacatttctaaaacattagtaaaagctcctaaatgttcacttgggctttgaaaggttttctaaagtaaggattataaatgagcactctgtttgcaagccccattcttatctcctcttgggaaattctcaatgtggcattaaatgacattgcacaaaagatttgtttctcaagccctacaagactttctagacctcaggctgtacctgcagaataggataatgttccagattctcccagcgttgcctaaaacactaagtaaaaactgaacaaaatagatatggaatattccattaggggtgggcttcctttggtcttttagaacctacaggaagacaaaggacaggaagctcatgctttaggggaagccactgtgtaccagccttcaccatgctgtgccacgtccttacattcactgtcttactccattcatccctgggggtcacataagataagcatcatatccctattggacagaggcaaagatggaatctcagtgaggtaactcactttcccaaggtgatatagctggacaatgctgagaaatgccggagccgaaacttaagtctgctgggctcccaagcccaggctatcatctgccattactacagtttatgttttttgtttttgtttttgtttttcattctgtgtatatcagccctggtgaaaaatgacttccagattcccacagccgcattatgtggaatagaaaagacatgggcgtgcttctcactctgccgccgtagagggtgggtttgcagtggtttctgagcactttggactgcggtgcacaatgagaactctattttgcattcacacacacacacacacacacacacacacacacaaacagagcatccatggaacaatagtgactctcccagtgtatgtgtactttggtattttctgttctattccattctgtttcattctttaaaacaatgctgctgtgaccacggaattgatttccctatccacgagtgtatttgtgacctacagtttgaaaaatcctgaattccagcaatacagcaacactgtttggtttgactgattcttgcctccctttcggaaaaagcttccgccgaacagaggattcatcagggtctcggctatgaagcctgtcttatcctttcaactgtaaagacagacgggtctgagtgagggcgtgagcagggccgccagccgaggcacatagcggaggactggggtggagcagggcaggtagggtttagcatctgtatcggtgcagatcacctctgtgcacacagagaaggggttcctgggacttacccttcacctgccgctagaggacatgtggaaaaataaaccaatctaagttactgtgagcatcaccttattttgtgattcgcaggcctgtctttcctgctagcctaggaaccctgtgagggcaggggctgtgtctgatttgtctttttcatatctgtatccccatatccaagcacaatgcctgacctataagtaaacaaagcataaaatagatgtctgattgaaaacacagggcttattgttcctgtttcaacacccagtgctgcaccactttaatctccatcttcagcaccatagcctgccttctgccctgactcttgctgtctcgaagtctcggaagaaagcagtcctgagccctgtcacatgtgagttaggccttcctgtctttctgccttgtgatgtccaacagcaacccttcctgggtgccgcccacactgagcctggctttgctcaggagcctaaatgcagaatctttcctcctccccctcccctgctggaaatgctgaatccgggactgcagcccagaaggcgcatggggaaattaggtccacgaacgcgtccccagcgttggggaggtatgccactcagcaccctggacacgccaggccgcagcgctggtcttccacagtccccatgctgtatggaaaaggccccttgccccacggctggagaggggagctggtcgtgggaagagtggaagagaaaccacaaacatgcaattttcagatgcggagaatgcagagacagggcatgggaagtgggggtcgggagaggaagaggaagagacaccaagtcggcaggagcccaagcgagtggccagagcttccaccctcggtggccttgggcccatgttttagaagctcagcgtttggcatgggcgaagatatattttaggaatgaaactggtattttgtgaatagaaataacatcttgttcctaactgacttcagagtcagacgactggcttcacgagggcccggtgtgcagacagcctgccagggcctgcgggctctccccacgtgctgtgcccccaccccagcccaaacactggccccaaatgcttctcttcaatgcctggcaagtaaagatttggaaaaaaaaataagttcagaaaggaacacacaaaactttttaagtgttaaagtattttcttctgaaggccatcagaaaagaaacttgagcttatttgtcaaaggtttgttaacctaataatgccgtagaaatgtttaatgcagtgagaaccttcaggtctatcaaaactgcaagcaccataacaacgcgagaactcagccgtggcccataacaatctggaattaacgataacacccggcacacaaacggcaatatgtacacccacccagcggtgtgcggccggtgactctaccaggtaacgaactcaccgctccctggtttcaaaggcgtatacatttaattctatgtggtaacctggagaaatggacacctgtgaatccctgctgtgttctggatagatgcatcagtcccttatagtttaaaccatgtacatttgggatcatgaaaaacggtgtgtgctgttgtgcaggacgtgaagatttgtgcttcttgcatcgtggggtagaagcagctcccccactggctgctcggctcccagcccctggcttgctagaggagatcggagccagcaagtggtccctgaatggtccagtgaaggctgccgagcacccaggagaactgatactgcacctgagggtcatggacgatgaaatttcactgtgtagagaaactgagatttcacggtttatgtgtaacagggaaggtggtgttgctttagtaaatagaactgggcatgttagaatatcggcaagtgcactctaatttcctcctgtgccaaatccagctgattttacagcattctcagtgggctccttagcatgtgtaggtggggtttgcacagtcccgtagggatactaagtaggatgtagaaattgctcattccttactgcagaggcctggatattcacatccacctggcccaggagggcctatgaattgctctcccagcacctcctaatatcagtttattaattttatttgacatgttgcaaatctccaaaacatcctagagctccatgcttagcatgagtttcctcggattaaccatcattttctactatttctccgtttatgtagatggaagagaagatgaatagtaataatcttttctcaggggtgttgcaaataagctttatattaatttcatcacattatatgacttaaatatcaaaaataaaaatgtgtgtctctctcttcagcagcagggaaaatacctgctggacgtagtcacagactctgtgggctttaactggcagcaaacggtcctggtagaggagaggagaagggggagaaggggcttgtgggaacgagagtaggggctttctatcaaccaattaattaggatctagatagaataaaagcaacaagcaggggaagaatggaggaggggagggagagagggaagaaagaaaggagcagagaggaaggtaggcaattaggtaagaaggggaggaggaaggaagggaggagaaaataagtagaaaagcaaattgacagtggtggttctcagagatggtctgtggacccacagaatcaacatctcctaggaacttgttagaaatacaaattctcgggccttactccagacccactgaatcagaaactcttaccatatgtgtttcgacatgccctccaggtgactctaacacccactctaatttaggaaccttctttaggcattgataggtagaagaatgtaataccaaggactaataaccatgagccccaccagctgtcatagcagagggcttgtacccacggaggatcagtccaggctcctggagagaaacaataagcaacagtccccgtgaaccacagcatgtgacatgtgacatcaccacgtgtgcaggcaaatctctcagaagaaacctcaactgtgtctcaggaaactctggtggttgggtgggaggctggagtctccttaaaataaaggtcatgactttgggaaaaaggtggatatgggtgatgacacattgtctacataagaggactgagctgttgggaccaaggtgaaccagtgaaaacacacgtttggaggaggctagaatttcataacactttatgtcccacatttccacctctagctctctggaggacaggctgggaaggtctcattggccacactgacttccagtcaagtatcccttttcttctggttttgatcggctccctgtcaagatgaatgagatttttgttaaacacgggattttgttgtgacttgggatggggttcatctcaaaaaggagaggaagagcccattcagcggaaaacccattggaagatgaggagtggagaggaaatacttggacggagctctgcaacacttgatggggacaggactccaggttcatgtaaaaggaagacgccaagagaagcacaaccctgtaattcctgtaattcccaggaagccatcaccaggggtcacgtcgggtgtgctcaaagtgcggcacattctaccaaccccgtttgcttttccgaggggggtgggggtcactgaattgatagaccttttccgaggtgggtgggggtcactgaattgatagaccttttccgaggggggtgggggtcactgaattgatagacctaaataccatattcatcctgtagcttgattttctttcttttattctttctttttttttttttttgtgaagaagtctcactctgtcatccaggctggagtgcagtggcacaatctcagctcactgcatcatccacttcttgggtaaagcaattcttgtgcctcagcctcctgagtagctgggattatgggcacgtgccaccacacctggctaatttttgtatttttagtggagacaggatttcaccatgttgggcaggctggtcttgaacttttgacctcaagtaatctgcccacctgggcctccgaaagtgctgagattacaggtgttagccactatgccctgccgattttctttcattcactcattcattcattcattcattcattcagtaagcactttgtagataagatgagaaatatggattgggtaataggtcattagatggactcccactcacatcacccaagcagggtggggattgagctatgcccaaagagtgtgatttacttgatcagccaccacttggagggtgacctcaacaaactctagcatgctgggcttctcctgggcagtaccgtctgtgacttggagcaaatggagatggcatccctgtcaaatatgcaggtgtcacagctaagggggtaattcatcgattctgccccagaatcagaaatcaaaaataaattgctttgttagattggtggttggaatcaacacactgaaatgtagaaaggataagccaacatgctgcactcggatacaacaaccactaacgtggcagcaggatggggagacgtgacttgtcaccagttataacacttggggtttacacccagagagagctgtgaccgtaacttaaactctctgtggatgacaggtttccagatcgaggtaaatggcagcaccatacaaccctgtactggctagatgcgcgtcaagcatcggctccgggtgcctggccaccaggggaagcaggaaaattcaggcccctctgaggagcagagccagaggggcagtgcttcatctgtctcatcgtgtgagccacacagagagaaccaaggcatgtgttcctcctatcatagtcaagtccagttagatatctttgtgacattcaaatagtgtgacagctatatatgtgtacgaaaacagcttacgcagaagacagaggggaaccaatgggcagaagttgctcaaagaaagatttcagttcagcataagggaaatcctccttatgatgtacaccctgcacgagttgacgtaaggagcaggaaggttgggtccaagaagttttgctggtggcagttgacaggtcgcaggcttgggtgaggtgacaggactcctgcccagcaagttggcacatgccgtgacctaggagggcccctggggcaccttctcctccagtctgcataactctatctggacatcatcaacgggcttttcatacgcgccttggtgctatgaagcttcacacaagaagcgttcggcaccaacattcaggtgattttaatttcatataacaaaaccatgatgctgaatggagcgtatgtattccagcttgcgtccatgccttggcatgttcccaggttgcactagccttcccgctgtgtttcatctggcaattatcacttatatttaaagctttggcccaggaactgtctcctccgtagggcctcctttaaagaattccatgctgacctgcactgtagcactattacacagaagtgtaaatgtctgcttcccctactacactatgagctccattaaggcagagacatcgaacttagatttgttacataaacacaaagaaaggaccaggtttcataacagtaggcccccatacatacacattcacatacatgcgcaaacagagacaagtatacatatacatgtatacatacacatctgcatctatatatacacatgcacacacatgcatgtggacacgtatatatacatggacacagataagtctatatacacatatttaagtatacatagatatgttcttgtacatgtatatatacacgtacatctgtacatcctcacacatacacatatgcatgcagttatcagataaaatcggcttctgtgtaattgaaaatctaaagccaaaataattatttcagcaaattataatatttataaattgaacttgtatattttgccatattattagtctgtaatcttttatcacagaatttttagggaggaaaggaaaagtttactagccaatggtaatgttactcataacagagaatcaatagattgtatccagagaaagagaggactaaggttctatgtaaacgtctgaattatgtgtgtataaacattagagcaaaagtacaaaaaccttcccgattactaaaacatatcaaaaaagagagaaaacagaccaaataaagacacacacacttacatatgtcaagaagtgtacatgtaattatatgtatgtagagaaatatatgtagatatagcaactatctacatataaatatatgtagatatagcaaatatatgtagctatatgacagaagtgaagtgaaatttattgattatatcaataaatatactggacttaattagctttataaaaataaataacatttccccagcactttgggaggccgaggtgggtggatcacctgaggtcaagagttctagaccagcctggccaacatggtgaaactctgtctctactgaaaatacaaaaattagccgggcatggtggtgcacgcctataatcccagctactcaggaggctgagtcaggagaatcgcttgaacctgagaggcagaggttgcagtgagttgagatagcgccactgcactccagcctgggtgacagagtgagactctgcctcaaaaaaaaaaaaaaaaaagtacatagatagatagatcgatcgatcgatcatgtcctaggccacagaaaacccaaacaggtccaaagaatgcagacaaatgcaccagataagaaagttgcggattagttttatcttaagagtgttgatgggaaaagctaaaatggtaaaaattatcaaaatccaacagtacatttaaaacagtagatcatattcaagtgggatttattccaagaatgcagttttgatatttgccaatattcaatgcccatctggagtacaagcatatgataaaatagaaatgtattgacatttatttgatacggtaaactgtgcatgtacctcaagctctcaaatctgcattccccatctacttgactgggaaaccctacaggcattcctgctgaaggcagaagcgtaaggtagtccacagtctcctctgctctttaatattgaaatcgacacatttgccacagctgtagacaagagaaagcaaggcgaggtataaatccccaaaaggaagtgattaaactatctttatttgcagataataatatatgatatctggaaactactatgagcaataaagaatttagcaaactagcaagctataaaatcagcatgaaaaaacaaaccgacttcatatgcacaagcaaaacatagcttgaagttgtaatcagagagaagatcccatttacaataacagaataacattagaaaagaaaagaaagctggggataaacttaagaaatagcaaacacatacgaagaaaagtacaaatgctgctggaagttactagagaaggtgtaaacaaacggaccgtgtttttgaacaggaagactcaacatcacagggaagttagtgctccttgtgtgaatttagaattgtcacatgatccccaataaaataataacagatttttttctggagctagaaaagttaatttaaaattcattcataaaaataaatgagcaaaaatagtcaggaaacttctgaaataaaagtaatgagggtggactagtctcctttaggtattaaaacatattgtaaagtgctgtaactaaaatggtgtgtctattggtggatgactagaagatgtccggaacagaacagaaagcccagaaatggaccccattcgatatggcaatttagtatataataaaaggacatcttgaataactgaataaaatagactttttgataagcattattgaaataagtggatacctatatggaaaaaatacaaaactgtatccattccctacccccatatacaaggatacattccaagtggatcggagatatcaatattaaaaatatgaaactgtacaagtactagaataaaacactagttttagtctctctaacctggaagtggggaaaacttgtctaacaatgactcaaaatctcgaagcaataatgaaaagattgatgaactgactatttagaagctttaaaaagctaaaatattccatatgcaaaaaaatacaatgagcaaaggaaaacaagacaaatagcaaattgggggaaatctttgcagtttatatcccagagaaatggttaatatctctatattaagagctctaaaacagagaagaagaagaaaattagaagaaaaatgggcaagctctatgaaacaagagttcacagaagtgcaaatggcccataaccacaggagaatacgctcaaccttatcaaggtaacacataaaaagtgatggtacacagacacacagagaacaatgtgataaaaatgcaaaagtctgacaatactctgatgaggctcgggggagggggaagaggcattgctgctaggaatgcaatgatacaacccctaattaattcaatccaaacacatcagtgggtgctagaactagtgggagaagtttgatgaggaacaggatagactcctcacaaagtatgtatacatcacaaaggaaaaaaaacggagtaactcgaccctggagaaacctggcagtgagtggttgcagttagcaccaccagtaatggggcacctcagaactgtgtaccactggataggatgcgatgaaaagaacacagcctcgcctctgtgctattcgtgcctacgatgcaagcctgaatcaagttaaaaagaaacatcagatggactcaaactaggaacatattgcacaagaaattggacggcagcctccaaaagtgacaaggtcatgaaagtcaagaactactccagattgaagaagacgaaagagacatgattcctaaatgcagcatacgatcaaaattggattctgtcaccacagaagacgttgtgggaaaacaggagaaaccgtagattagatggcagtcatgtgtcaatgccgacgtcccggttttgatgccaatattgtggttacctggtgagtgttcttggaagtacatactccagtatttgggggtgatgggcctcatgttagcagctcactctcaaacagtttttaatgtctttatacaatttgaaattctttgtaaatttgaaatatttcaaaatgaaaattatctttggcgtttaaaaatgtttctcattctttttcatttaaaacacaaactgatgcagcccctgaagcaggacaagttagcagtaactaattaacctgtttaccttctcactcacaaactcgacttttaggagtttattccaaaaatgaacttgcagacaaatgaaaagatacaggtacaagcctattcgctgcaacaccacttgttatagcaaaagactggaatctaccaaaatgcccatcattaagagaccgactgagtagaccatggtatatccacaagatggcatattatatatcataacagaaagaggacgaattcgagaactagagctatggggaaaaagaaggtaccaaaatagaaatcagcattctctgaatatatttgcttatagaattggctttgaaagcatgtaaatatattttatctattcatagcactaaattaattttttttggagacggagtcttgctctgttgcccaggctggagtgcagtggcacagtcttggctcaccgcaacttccacctcccgggttcaagcaattctcctgccttagcctcccgagtagctgggattacaagcacgtaccaccatgcccagctatttttttttttcttatctttagtagagatggggtttcaccatgttggtgaggctggtcttgaactcctgacctcaagcaatccatccaccttggcctctcaaagtgctgggattacaggtgtgtgccaccatgcccagccagcactaaattaatttttaagcctttggaaaagaaattctaagaaattgaaggcaaaattaagcaaagggacagaattgtatactgagttggtggcataacagtatggaaagtaactgtttcacataactttgaaagatggaaatttgtacatcctagtgggatgtactctaaggacaaagaaaaaaagattttcaactgttttcagccattggaatgttggtgggagtggcatggcagatttgtgtctttaagacagttgcatgagtattgtggggctaaagcaactaagtgattatgttgatgtctttgggaaatgagattttcagcccagtcttaactttaagtctgaattgggactataatgattttaccttttaaaacttaacctagtggcactgagcttcctagtaacagaaaaatagcaagtttcttggataaacacatgattgcaggtcagaagcagataatgtgtaagatgagcctggaacatctcatcattccaagaagcaaagacggtatgctatcaactatcaacatggccttgtcaaaaaaactcttaggccaacttgaagaggctcctgctagttaaagatgggaaaatttacaaatccataataataataataactgcaatggactgaaatgcttcaagtacatttcaatccgtaactattcaatgctgaatttgtatgaaacttccaagtcaaaaatctcttttaagatttttagtaagaaacttgagcttcatcggtgaacataacattttctacaccggattttattcttgtgatgacttcattcaagacttttaatgataacctcttcaaatatttgaaagccgcaattgacaagaaagcttctgccaaagtaggaggtcacaattgctgggaaattatttattgctttttccttagttgagagcaacttttttcttgacattaactagaattcagataattaagtctctttaaattatactataagggtacagtgtttctttaggtcgacagttcttctttttatttctttgacaaaagtaatgaatggttttgtgatcgtgtaaatggatttggaatctgatcaaatgtttttaatatcaggtatttcaaaataatgggcatttctgtagacctacatggatgccgctctaccagtcttcattatttttctttagggcataaacactgacttctttaggattacaaaactgattacatctcacagtttttaacaccgtaacatagttgaaattttgctttgaatccatacattttacacgtacacgttagtatatgccatggtctaaatattagtgtccctccaaaatgtgtgtgaaaattgtaacccccaggagatggtgttaggagatggtgcctttgaggggattagattgtgagggctggttgggattagcacccttatgaaagagacctctgagagctagctagtcccttctgtcatatgagattacagttagaaggcaccatctctaagaaaacaggccctcaccagacactgaatctgcctcagtcttggccatcccagcttgcagaactgtgagaaataaatgtttgttgtttatgtgctacacagtctatgatatttttgttatagcagcctgaactaagttggtatacttttcacaggttcttgcagctgtctattgcattcactcaggtgcccaaagacgtcatttaagaggccgtttttgataccaatatcctctgctttaaccaatcttcaaagtgagaccccttcaccaaaagtaataacaatgatgatgataacgatgcattgttcatagattcttgcaaaactctttggacagccaatgcttgtcaatttgaaattgcaataggaaatttaaacgtttctgcttttgaataatattgtttgaagatgcatggatgacaggtcagatgaccaaagacgaacttcatctagaagatcattaaatcgaacaagcttcgactgcacactgggagaactgatgttagtaacaacacttgatgtgtagcgtgagtctgaatctctcaaaagaaattcttgggctaggcatggtggctcattacctgtaatcccaatactttgggaggatgaggtggggggatcagtggaagccaggggcttgagaccagcttgggccgcatagtgagacccatctctacaaaaaatgcaaaaaattagctgattgtgatgactcatctgtaattgcagctactcgggaggctgagttgggaggatcgcctgagcctgggaggttgaggttgctgcagtgggccatgattgaaacattgcatcccagcttgggcgacagtgcaagaccacatctcaaaaataaaaataaaatagcttcttttgtcaaaaatgacattctgattccatatttttcacaaagcaaaaagcaagtgggaccatagcatcttggattttattagacgtgccattctgataacatcacttaatgaggaatacagctttataggccatcttttacctagagaccttctctgcgaatacaacaatggatttcttgattcccaggctcttcagattgaattttgctataaagtgtttatacctttttaccatcattggtatccaaaacttataatttttttctctattatgtattccaaagtgtttgtgtaagctttgaccatttcatccccagcagtttgtctggtatatggtagatactgtagtgctgccacccaggtcggttcttcagggtgacacagctgtccccagtgctggcacataggctgcccagctcacagctgtgaccttcactgagaactgcctgaccaaggtgacacccctcccatgggtcatcctgtggctaacggcgccacaggaaagcccagtcccctttgaatcagttgaggacaacttaagacccctctattccagagctccccagaggatcgactgaggcctcagctactgccatcctgtgggacagcttctccttctgccctgtcctggcctccccacttcctggcagatgtctctgttgagttccactgaaacttaaactccaaactcttcacgcccagagtctatgaccggggcaaacaattgaagacagggaatttttttttttgtaccttaaatagtgttcaaagcatttattttgagggattcaaactcatgccatacaccaagtgccgttactaacatcagcacttatcaatctgcagtggaagcttgtttgatgtaataatcctctagactgggtttctctgggtcatttgacctgtcatccatgcatcttctaatggtattattcgaaagcggtacttttcttatttcctgtgcttcactggtcccaaacatgttgctgacagtttctaatgcaccttggcaaagtgagtgattctgcaattgcaggaggaattttggctttggctgttaaatgcaggacattggaactagcatcttgtattcagtctgacacagttgtggtccactcatcaatactcccacttcttattgtgtaactgcagacaattttcccagttctgatctttttctgtatgagatcaatgctttagggaaaggtgctggcataatttgcctgatgtcattgcatcttctgattcctttttcattaaatacgacattgagacagaagaagacaggattattggaaaatgcaaatctgaatttgagatcattttcattataatttcctgagtagcaactttttttaccactctacttggtacacttgatgactttctttaattaaaaaacgtaaggacaaaaaaccaaacaccgcatgttctcactcataggtgggaattgaacaatgagaacacatggacacaggaaggggaacatcacacaccggggcctgttgtggggtggggggagcggggagggatagcattaggagatatacctaatgttaaatgacgagttaatgggttcagcacaccaacatggcacatgtatacatatgtaactaaccagcacgttgtgcacatgtaccggaaaacttaaagtataataaaaaaaaaagtttcttattatgatgggaaaatatctctctataaatatgcaacagtattaaaaatatcaacctaagtaattttactaaatatatacatatttaaatataaaagtatataaagtggcctgtaggccttaatggcttcaaaaattaacttttcaagatattttgattgcatacatcctcaagaatgtttcaaaataaatcaagttgaaaaattcaaaaagcaaagcttgcattaaccaaaatgagcaatattgacattcctttttatttgattggacaattaaagttctgaaaaactcatgaatataaatgtcagtgatgtcatctctgatccaaaatattttgaaaactcaattatttgaagatataaaaccctacagtcctctttactgagttgatttaattatggaacttattataacatctttaaaaatctgtaaaaacagtaatttattttgagattccatcagtaatcagatcttgctaaatttacatcatcactagccagaaacgaagggaagggggtgggggagaagaaaattttaaaaatcatttttgttttaataaggaacacctaataccagataataattataaacataatcatacgttttacttagtcacataggtaaaaatactagcaaattaattgaataagaagcgcccccacatgctgagcatgttactgaaccaaactgggtttgtctgtccctgcatgagaggaagacgctgaagcactgggtttttgcagcaaaaaagctttattgaatgtcaagtggtgaggagcaggaggaaagactcaaatctgtctcaccacactgggggctgtaccgggctttataagcatagggtaatgaggcgtgttctgattggatcttgcagtggggtaacgccagagctgaatctgattggatcctgcttcagctttgccatgtccatttcttaatccagtccctgctcctctgcctgagcacttaggttcccccaccgtggttgcatgcttggttcatctgagtgtgctcagagtctgtagtcttcaacccgggggtccgtggcaactgaaaaacaactcacaacctacttacacacaagtcgaaccacattgtgaagcggcatttttgtctagggtaatacccaaagtttgttgtctcacgctgacgaaatcaaggacccggacacacaaggagtgaggttaagagtggaggtttaataggcgaaagagagaagagctctctcctgcagaggggtccggagtgggtttttccagtccgccacaaaatgcaaaggattttacagatgagctggaggaggcaatgtctgatttacatagggcatgaaagattggtcagaccaggtgtgccatttgcataaggcacaaaaaaccaggactggatgcgccatttgcatagcctccaaaaatctggccacccacaccctaatcttttattatgcggatgggttatctcccccgctggtgccttgttgcctgcatttttactgtacacgtggtgacaaagaaaacggaagatggagcctccatgttgaatgtgtctggccctcaggtagcccttttctgttggcacagctgccggcattcacctgtgcaagtttctagcttgcttatctatgtctgcagctcagtttttcaggctgctctttgttagaaaagaaatgatttgggagctgttttctgttaaaagggaagccttgccaaagactctcttaccctcactatctgcctaaataatttctttctagctcctgtatcaattggtcctgtgcctggtacagacaaacaaattcacagatgagaaacaacctgcaagtgaaataaaacagcttgataagaggggtccatgggggtgtcagggaagtgccgtgtggctcagccaacctgtgcctttctgcagcagatcctctcaagagagttaccgggttcagaaagtttacaggaaccacatgcatagttttgttttacttttttttttttttggagtactttcagattcataggacagttgagtagaaagttaaaagagttttgatatactctctgcccaacatgtacaaagcctctcccactatcagcatcccccaccagagtggtacctttcttatgagcagtgaacctaccttgatacatcactacccaaaatccatagtttacgtgagggttcacgcttggcactgtgcattctgtgggctttgagaagcatatggtgacatgtatcccccgttatagcctacagaagagtttccttgccctcaaaacccccatgctcctcctgttcacccctcctgactgccgacccccagcagccactggtccttttgctgtctccatagtttgaccttttccaaaatgtcatatgtagttggaatcacacaacacatggcttttccagaatgacatctttcactgaggaatgtttaatgcatgcgtgtcgtgaaaacacagcatatatatagtgaaaacagcatgaaatgtaacttcaacagctgcaattttttttttcttttttgtgacggagtctcgctcccttgccaggctggagtgcagtggtgagatctcggctcactgcaacctccgcctcccaggttcgagcaatactcctgcctcatcctcctgagtagctgggactacaggcccgcgccaccacgcccagctaatttttgtgtttttagtagaggtggggtttcatcatgttggcccggatggtctctatctcttgacctcgtgatccacccaccttggcctcccaaagtgctgggattacaggcatgaaccaccgtgcccggccaacagttgcaaatgtttgaatggctgtaaacggtggtttatggctacaaaaactaacagatatccctgtctctgggtccctgtgtaacctatccgaggcacagtgagagaccactgcactgtcccacctccttcttccccatccactcccagaaatcctctcttcaggtaggagaaactgctactctctgatccaggtttcacatatttccgtgggatataaaacccctagtgcctgaaactgctcttctggtttctcctttcacctgtgattattccctgagtgtcgggggcttcaggacagaagactttgtcattggctgtgagcatcaagacagtgtccaatgggtttaggctgagagccagctcagccaggtgcctgcgtggggggaattatccagtgaaaagatatttgtctgctcagtgaaaaccagaaaggagcataacacctgtcacgttaccagcctgcctccaggcctgccattggaggcacagcaagggtctaatgctaatcatccggggaggaagtgtcccttgaggcttagtctgagcagcgggaggccacgctgcacacttgaaaccccttttgccttgacttttctgcagcatagttggactaagcccttgtcgttggcttaagaaggggcagggttatgtaaccctcaataattaagacctttccagccataaccactcttttattttcaacactgtcaagaaggatttgccggctgtaactctttctcgcttgagggcatttttaattccattgtccacaaatttctgagtcatttctgatggcggtaatcaggacaaagagaagccgaagacctgggaataaaagcaaggttggcgattttttgaattaaacctagggtattgagagaaaggaaactgaggctttagaacctcccttgtcctgtgactggggaaggagagtgtgtgcccacaggtcaggctccgaatctgacaccagggagcccaggtagagtgagtgtcacagccaggggctcaggtagagtgagtgtcacagccagagacccaggtagagtgagtatcatagccaggagctcaagtagagtgagtgtcacagccaggggcccaggtagagtgagtgtcacagccaggggctcaggtagagtgagtgtcacagccaggggcccaggtagagtgagtgtcacagccaggggcccaggtagagtgagtcacagccgggggcccaggtagagtgagtgtcacagccagggacccaggcagagtgagtgtcacagccagggactcaggcagagtgagtgtcacagccaggggctcaggtagagtgagtgtcacagccagggcctcaggtagaatgagtgtcacagccaggggctcaggtagagtgagtgtgagagctcgtgattttaggtagcccacataatgagaagggaggggaaaatgccttgttaaatgggtgaactcaggaatttgtttctctgtaaacatggtgtgccccagagaggcactgcctccaggatgcaggaccagaacttgacgtgaggattgtgctgcagccacgcaaaggtacagacgtcctcttgaatctgcaggaaatgactacttatttaaattatgcaaatttttttgttgcatatgatcctcatagccttactttagagaatttaacaacatttgatatttggtattctggcattcctgagtcagtaattgggcttcgtgaaaccccagagctaaacctaccgagaatgagatgccgtcctcaaccccagaggttgtgggttctaagagaaaacgtcacaacaaatgttggtcttttcccaatagctcctggcgtttattctttcttttcccttttcttcctttttctccttcctcctcttgtgttttcttttctttctttcagcagagattgttctggtcatctattgctgcctaactgactaccccaaaacttagagattaaaagcaacacctgtttatatgtcatgattttgcgggtcaggagttggagcagggcttggatatgtgaccgtctgtgcctctcattcagttgggaagatggcttcgtgcacacgttggcgccatggctaggaaagcggaaaggctggctccctgggctgtccactgggcagctgcccctggcctcgccagcctgcagcctcaggatccccacactcctaccgctgctcagggctcccggaaggcagcagaagctgctagtttattaggacctggatcatactctattggtcaagcagtctcagagcctacattgaagggtttcagacatagacaccacctcttcatgggaaaagtatcaaagaatatgcagcattttgctttgctttatttttttttagggacagggccttactctgttgcttggagtgcagtggcaggagcatagctcacggtaacctcaaactcctgggctcaaaccatcctcccacctcagcctcccaagtagctaggactacaggtgcatgccaccatgcctggctactttttttacttttgtagagacagattatctcaccctgttgcccaggctggtctcaaactcctgggctcaagcgatcctcccaccccagactcccaaagtgttgggattacaggcatcagtcaccatgccctgcctgcagcatgtttgaaaagtgagatttattgtggtttcataatttacatacagtaaaactcaccctttctagagtacagttatatatacattttcacaaacatctttagcccacattcaccagcgtgacggagatatgactatttctgtcacctcccccaaaagtctttgtgcttttatattcacccctttacccccaccccagcacttggcaagcactgctgttttttcttcttatatctttgcctatttcagaacatcatataaatggagcatgcagtgtgcagtcttcagaacctggcttccttcccttagtgtcatgcatttgagattcacctgtgcgttcatgcgtataagtattttgttcccttctactactgagcagcatcccattccatagacacactacagtttgtttcccatccattggtttaaaaacatttaggatgtttgcagtttggggtgattattaaagctgctatgaatatcacatatagattttatttatttatttatttagagacagggtctcactctgtgcccaggctggagtgcagtggtgtaatcacagctcactgcagcctcaacctcctgagctctagtgatccccccatctcagcctcccaagtagctgggactataggtgtgtgccatcatgcccagctacttttttgatttttttttgtagggacggggtctctctgtgttacccagactggtttcaacctcctgggctcaagcgatcctcccacctcggcctcccaaaatgctgggattacaagtgtgagccactatgccccgcttcatgtagatttttatgtgaacttttacatgtcttgtgcacagttacccgggggcaggattaccgggtcacgtggctcgcgcatgtttaacttcgtaagaaagcaccaaacggtcccaccaggtggccgtgccatgggcatccgcatctcaaactgcgagggccttgggcactccacatcttcacggacatgggttgttattgctgttggtttgtgatgtttgagtccttctaataggggtccagggcatcccatcatggtaaatgggatggtgaggttctcttcactcatggatttcctgtcgttctattggctttggtgaagtaactattctttttgcgtacatttttggttttcttacagttgaattttgaaaattcttttttctgcatagtaggtttttgttctttttttttgtttttttctttttaagagacaaagtcttacttggttgctcacggcagcctcacactcctggggtcaagggatcctcctgcctcagcctcccgagtagcagggactacaggcatgcactaccacacccagctgatttttttttttaattttgtaattctttgtagcggtggggtctcactatgttgcccaggctggcctcaaagtcctggcctcaagcgatcctcctacctcaacctcccaaagttctggcattccagccgtgagccatgagccacagcacccggcctggataaacgttctttattgggtatctgtcttgcacacgttgtctcccagtctgtggcctgtcttttcatgaagtcagctttattcattttttttcttttatggattatgtccttgatattctatctgagaaatttttccctaacccagtgtcataactgttttttcctagaagtattaataattataggtttacatttatgcctctgatccattttgagttaggttttataaatggtaagaaatatagatctagattttgtcttattttgtgaatgaatgtctaatatttccagcaccatttgtcgaaattactatcttttctttgtgcttttattgaaaaccagtgatatatgtgtgagtaatttcttgcctgtcttctctgatcagtgtgtccagcccttctccagtaacacccgttttaattactgttgatttccagttagtcttgaaatcatacagtaaaggttatccaaatttttttcagacttgctttggctattctagttaccttgcttttccatatagattttagaatcaccttttcaatgtctaggagatatctagctgtgattttttttttttcttttttgagagcgggtcttgctctgtaacccaggctggagtgcagtgtagctgggatttagattggggttttattcactatattgattggtttggggagaattgacctctttactgtgttttcttccaatgcacccatgtgatatgattctgtattgacttaggtgtttggtttccttcattcgtgttttgtagttttccgtgcacagctattgcacgtagtttgttaaacttgtatctattttatgtttttagagcttaaatgagatattagctgtaggcgttttataggtgccctttttaaaatttagaatgttcctttaaattcctactttgctgagagggttttttcttttttaaaaaatcacaattgattattaaattttgccgaatgcttttcctaaatctattaagatgttcatatgtttttctattttattctgttgatgtgatgaattactttgattgttattcacatcttgagccagccttccatgtataagatacacctcgcttgatcaggctagactatgactgttatatattgttgaattttattttctaatattttgttgaggatttttttgaatttgtgttcatgatggatattggtctatagttttccttcagaggctttttctgattttggtatcagggtaatgctttagaattggtttaatttattcctcaaatgcttggtggaattcatccatgaaatatgcgtagttcttacctttgttcctctggatgctgtgtgtctgcgctcccaaagcttctgtcctctcttgtagctcacattcagccttcggccattcattgaggattttgggtgaatttcagaatttccattgtctcctcctcccgcgctctgtgacgggtgagcaggacccatcctgactccttggacaggcccatctttccttgtgtttccgaccacctggctggtatgcaacctaagctgtcttatgggctcaggaaaagtgattgttttgtactttgttcaacttttcttgttcttaggtggatgtgatgttctttccaatgctcggcatcccaggcacagcaagccctgtgtccatttttaacccacacattttacaggatggcaagtagggcagtttcctggtgacttagagagggggccgaggggcatcacagccatgaccagcagtggatggggacagagggtcctcctgcatgcctgggaagagaagacttgaggggcttggccaagtttatgtttgtctcatctctgcctgagacgggcttttggggaagggagccgagaagagtgtagcgattttcaccaggaccacatgggatcccgtgtgttccggccgagaagacccttgtttttctttctctgcgtggatccacaggatcttaggcttctgtgcctcactttagaacaagcacctgaagaaccaggaccttccttccacccagtggaagccttgatggtgcagccggaggcttggctcctctctgcaggccactggggttcccatcctgaagaagctagccctgcccactgccctttccggaaggccttcagttccccattgccttatgtatgcgtcatcagccgtgctgctgggcacggtagacaatcccagcgagacccgcgcactgtcagcaccccgcttccccccacccctcgtccagccgtgctccgtgtgcacccatcctcgccaggctccttggcaacattttgccttttcccatggctctcccagctgagagtgcccttctcaagaacttacccctcacaggccacccttcctcccaaacacagtccagatgaggccctccagccctcccaggccagaggcagtcatctgcccttcacgagtttgctgctctgcagagcatctgcctcttacagttacacgagcatgtcccctagaaagggcatgccctgaaggcagtcatttggcaggtatataattgggttcaatagctgttctgtaaaagagagaaacaaactgtggaaaatccaaaaatgattgtccccgttgacagacaaagagaaatttaacctccaacagcatatatgggacaagggtgatgattttgtttgcttgttccccaccccccgcctcaatgtaatgaacaatttagcttgaaacatagtggtatatattgagggaggatttctagatgaaaccttgccttgatctcaaatatctgttcattgaaaaagagattagagaaagctttgcttgccgtccgtcttggaaccacaggaaaggcccatctgtggaatgagaggatggtctggtccacctttctgcctatgccttaaagaattctgcaagagaaaatgaaaaatagcccaattctctttcttggtaatgccactgtaagcttcccaaaacattcatcacacttcctcggtctcagtgcaataattgcctgtgagcatgatggcagctaagggtttcctttctgtctctccaccccatggtccctcctgccatttgttctgctgtcatcaatgactgccctgccacagtgcccaccgcgcccccgcagaacgtgcagacggaagccgtgaactccaccaccattcagttcctgtggaaccctccgcctcagcagtttatcaatggcatcaaccagggatacaaggtacgtggcctgggttcagggcctgtgggcagctgtcattgtctggagccacagcgcgacgcagctggaggcaccccctcttgtgtatcaagagctggttgcattaagatacagggcgtcttgaccttggtgagaccaccatttatccaaagtcttggcatcagctctgcaggttcagaaattcaaattcctagttatcaagaggatggttcatacatcagtgagcaatttcttatgagaaaggccattcatttttaaatggtgggtgggagacgtgtctcagtgattagaatgaatatttgcacaaactacttcttcccagaaggaggtcctctcaggagaacacaggccccgagcaaagggaatggtgtgagtgatatttccatggagaaaggatagttttctctcctccctttctacttcagggagagttctgtttaaagaactgagaccagttgattccagctacccgcccatactgaattagacacatagacaaatttccatcatccgacttcttgtgtctttagctaccagagtgtgttaacttcactgatgtaccaggatacaccatcacaaagcacagctgatcctccctttcagatcagcttctcctgattggatttgggagcgcaccttgattttagctacaataggtccactaatcgtctttaatagacgatggacaggggaagctctatacagtgaagggattccatctagtttcctcaatacctggtaatttcacattcagagggtgagtttcctcagacacaaggttcagttttcttttcccacaatttgcattcaacttactaaaacactgatttgtctgccagaaaggcagaagtagctggaaattttccctgcctttcgtttaccctcagaagtatccaaagccagaagcttttgtgaaagaaaatcatattgatcaagcaagatgcttttgccttcttccctctcctgtcgagtctcgttggcaaggctgcagtgttcgtttgatgacttcgctgtcagtttgatctgtgtaaatacgctttgcgtcctgcagcatgtcaactttcagacccaattagtcctagaaatgtttggtgccaaaggaattaaaagtcacacacctacgtaatgctgccaaaacatgaacacgctttccttaggttgtggatacagtctgtatttctttaaaattgtaagcagtctcctaaaatcctttttgcgaaactagtgtgatataaattataaataattaagattattgctgttgaatcatggatgtcttttttgagacagagtaggtgctttctagaaaaatatttgtatttgtttcattgtgctgtttcagctgaattaacagatggtttcatctttattctttactgttaaaatatatattatatactatatggtatatattatatataccatatagtatatattatatatagtatatataatgtattatatatacatacatactatacgtatatattatatatactatatatgttatatatatgctatatatgttatatatgttatatatagtatactatatgtgtatatgttatgtatgttatatatagtatactatacatatatatgttatgtatgttatatatagtatactatatgtgtatataatatatatgtataatatatacatattatatataatatatgtataatatatacatatagtatatatgtatatattatacattatatatgtgtatatattatatatgtatacataacatatactatatatgttatatagtatataggttgtatataatatatatataatatatactttttatgtatatatgttatatatggatatatgtaatatatattatatatatgttttttaaccttcttaagtgaagagagggtgaagatttgagggagtgtccattattctaatatgagttaagtagttatttacatatacaagtataaaatacatgtaaatatacatgcttgtatacaaaaacctataaaatatatttttatctcaacttttttcaagcgtgattataaaatgcaggatttatggactttcttaattatgactttacattttaaaagacaaaataaaattctgctgcagacatgagtgtggagaaatgccattgaaaacaggctgtctttttcaccctgttccatctcagcttctggcatggccggcagatgcccccgaggctgtcactgtggtcactattgccccagatttccacggagtccaccatggacacataacgaacctgaagaagtttaccgcctacttcacttccgttctgtgcttcaccacccctggggacgggcctcccagcacacctcagctggtctggactcaggaagacagtgagtattcctttctgcgtgtctcttaagtcacttgtcaaagaggtgtataccgctgcaacttccagaatcaggcaagggcagaggtggatcacgaggaggccccggatttttggagtgcttgcagtcagctcacctagggagatcaggcatcagtactgataatgcctcgcagaggatggcacgtggacagtggagggtggccttggctcaaggaaggagctctggggacagggggtggagaatcaggttccagctgtgtggccacagctttggtcttgctgaacttgctcttcatgtagagttcaatttctgattccctcacctgcttccatgatccccccccccccgacgtcccccagcccattctttcctgaccctcgctcccagggtccttttccccacgcccttctaagctccctgagtttgcattacctccatctggtcagttcgaagccactccttctctgctcacaggccagctgacgcatctggaaaacgttagctaatgaagttaccccgagaaaatagtcacagatgcacacaaagatttatatatatacaaggcggctcgttacagttatttgtagctggaaaaaatgtgaaaagcattcagatgttccagatggggagaattgggaaaaagtatagaatgacaacataagaaatattttgtagttgttgaaaaaacgaaactctgaagatcaaaaattgtgcgcaaaaatggtcatgatataacattgtgaaataatagtatacaaaactatgagatccaaattttataaaaatatactgtatgaaatatgaacagagaaaagaccttggaagaaatacgtcacacaaatttaagacttgttatccctatgtggtatcattatgagtagttttggcatatttcgttgtatttttttgcattttctagtttctaccacgagtctgtactccctctgtaatgaaagttaaaactagaataattagggccatgcagtggttcatgcctgtaatcccagcactttgggaggctgaggcagttggatcacgaggtcaggagttcacgaccagcctggccaagatggtgaaaccccgtcattacgaaaaatacaaaaattagctgggtgtggtggcaggcgcctgtaatcccagctactcgggaggctgaggcaggagaatcacttgaacccaggaggcagaggttgcagtgagccgtgatcatgccactgcactccagcctgggtgacatagtgagactctgtctcaaaaaaaaaaaaaaaaaaaaaattaggaaaattattttttaagtcaccctgggctgctgcttgtctctcccccagtgctggatgggctcagccttctgaacttgtctctactagagtttggccgtcgccagctccaccccgtgctgctcccgtttttggactcccagcctcaccgcactcccagcaggtgacatttgcagaggccaaggccaccaagacggattccttgccttcccacttcaccctttatttccgtgtccttacgcttgcctctctcccctttcctctcaaacgatgcagtatggcctttctaagggtcctccgtcatcctgttcccttcttcccctctctgtcttcatggcgctattacttcttccaatctttttactattggatcctttccctcctcccacaaatatgttcaggtctccctcactcaaaatcggcagctccctgactgtgctgcccctggagctgccgggatggctccccactcccttttagtctaaccattgctttgaccttgaacgccttatgttctccttgacccttggcagcctagctttctccttgccactctcctggaacaatctcgccattgactcaaggtctatgtcaaatgagtgacaggggaggaatagaacatggatttcttgaccctctgagaccaacaatcaatccctcctcacaaaaaagatgaaatgaaaagtagccctgctgctgctgtgaattgatcccagaagttcttcccatactctgcctttgctctgctttctgcttttgtttaactgattttggctttttttgttttttgggttttttgttgttgttggtggtggtggtggttttttttgttgttgttgttgttttgagacagaatcttgctctgttgcccaggctggagtgcagtggtgcaatcttggctcactgcaacctctgcctccagggttcaagcaattctcctgccttggcctctcaagtagctggtattacaggcaccggccaccacgtctggccaatttttttgtatttttaatagagatggggtttcaccatgttggccaggctgctctcaaactcctgacctcaggtgatccgcacacctcagcctcccaaagtgctgggattacaggcataagccaccacactcaccaaggttaactgaaatttttattgagagcattacagattcatatgcaattatatgaaataatattgagaccgtgtacatttagcccagtttctgccaagctgacatttgcgaaactatagtattgcatcacgtccaggatattgacactgatgatacaattcacagatccgatttgggtttctccagttttgtttttttctcttttgtgcatatgtgtgtgtttagtcctgtacagtttgacacatgtgtaggtttgtgtatctaccacgataatcaagatcttgaatgtttctaaggccacaaaaatcatctgggttcctttatagccacacccaccttcctccagctcttcctttctaacctgtatgcctttcatttccttttcttgcatgatttgcagtgtctaggatttctagtactatgctgaataagagtgatgagaccagacatccttgcctgcttctcacctgagaggcaaaacattcagtcgttcactgttaaggatttttttttttaatcaagttgaagttattcctcactattgctaattggttctgagtttttgacatgaataaatcttactttttttcacgtgctcttactgcatcatttgacatgatcatctggtttttcttcttagcttgttggtctgttagattacattgactgatttgcaaatgtcaaaccagctttgtgtacttaaattcaacttggtcacagtgtataattcttttcatatgctgttggattgactttgctagcacttggcgaaggacttttgcatgtaagttcatgagagatattaatctgtagttgtctttttttgtgtgttatctttgtctggtgttggtatcagagtaatatggtcccatgaaatatgtttagaagtattcccacttctatgttctggaagagattgcgtaaaattggtgtcattttctctttaaatgtttggtagaattttccagtgaaactctcagggactgaagaattctttctaggaatatttttaatataaatgcaatttataaatggttttaggactatccaggttgtctgtttcatcttggctgagttttgggagttgttggttttcaaggagttgatcctctaagagttcagatttgtgagtatgaaaatgttagcagcaccaccttcttattggttgcaggatctgtagtgatgtcctgttttttattcctgatattgatgattggtttcttctggctttttaatgttgtcattcttcctggaggttcttcaattttattgcttgatttttttggtttgtttttgttgttgttgttgttgttgtttttgttttttgtttttttagaaccagcctcttgttccaggtctcctcttcttcatggtctccttcattttcaactttattgatttctgctctttataatttccttcctctgcttgctttgagtgtattttgctctcccttttctgctttcttgaggtagccatgttggttattggttgaagacctttccttgtttccagtgtgagcgtttagtgctgtacatttctgcttccatgatgctttagctgcatcccagatgttttgacactctatgctttcattttcatccagttctctgtatttttatttcctttgagatactctctgtgacccatgaattaattggaagtgtgctgttcattttccatgtgtttggagattctattgtctttctgctattgataatctgatttgattccattatgatcagagaacacacttcatataattttagttattttatatttgttgaagtttgtttaatggcctaggatatggtcaatcttggtgaatgttcaatgaatgattttttaaaaatgtctatttctccttttcaattgtaaattttatgtctcagagaaaactggaaataatctcaattttttttttttttttagaattttctaactgaatcattttttggtaggcagggagcctgtttatcctatttaggataataacacatctttgtaaatgtcaaatatcacattaaaagactgaaggtagggttgaagtcacctctggggggtgtagcttttaaaaggaaagtttggagcctgaatgagaggggcttcaggggccagctgaccacagtcacctggtactggcctccttcataaagaagaacaagaacagcaagtaggtaaccacacttcaaatagatccaagagagaagctggaattcaatagagaagtgacaggaagcacctatggcaaggaggaaagtgaagtgcagcagctcctccgggactgagatcggctgggaacccagacaggttccccactgtgggaaaagggaaagggagagacccccgtggtccacattcccaccacagactcctgcaatccgagccacaggaaagcccctcaaaactcacaggcccaagactcacgtagggagactctcacagggagaccgtgtgatgtcctgctccagagagggagcccacgctgcaccccacacgcccgagcccagagcagctactatgcagtgctgctcaaagagcccagccccaccagaacattccgccgtgggtcccaccagaccattccgccccgggtcccgacagaccattctgctccgggtcccgacagaccattccgccccggctcccgacagcctctgcatctccatattctgcagccccactgacatcccctgcccacaaccaccaccactgctggctgctgccaccagaggcaaagcacaaaccattggcagtgacccccagtggtggggctgctgggcattttcactcatcttgaggacagacttcgcttccaggcaccctgaggtcagactctcccacccacagttgccacctgggtctgaagcacacctccccagcagcagggccgcagtgcagccattgccagccctaccaagtgttctgccaggaacctgggggtcaccccaccccagctgaccacagctagcaactgcacacaccaccaggggtcctgaggacaggcctgcttggcttgctcagcctcccccagtatgagcaacactatccagggccctgggctcaccctgccctgtccaccactatgagcacctgagtacttctcctggggacctgaagtcgggcccacccaacctgctgcaccatcacagctggcacccattcctacacaccacccctgggcctggggactggcctgctcagcctgtcacagccaccagcaataccagtgcagactgctaaggagccaggggattgtcccaccactgctactgtcactgcctatagcatgcctgctgtccagggccttgagaacccacccacctgcttggccccctgcagccattgccagcacctgagcaacccacctagaatgccaagaatgagcctgtctggatcactctgggatgtaaggacaggcacactcagcccactgctgccaccactggggcccaaggattggcccacctggtgtccctgtccccagcaaaactttaccacagcctctactaacaaccacaccctaagccgctgaggaaatcacagacaccactgatgctgtttacagccaaataaattatatggagactacactactgcttcatccagaatcaaagccaaagtaccctatccaatcaacaccatagatacatcttcaggaaaaagccctcctttatgaaagcaaatccaaaaaattagaagaagcaactgttacaccagatgtgcagatatcaacataaggacacaagaaatatgaaaatgcaaggaagtataacacttccaaaggaacatggtaattctctagcaacagattccaatgaaaaagaaattatgaaatcccagaaaaaaaataaaaaataatgatattaaggaaagtcagataaaagagacacagataaataatacaaaataatccaaaaaacatttcaatacatgaatgagaaatttaccaaagagataaatattataaaaaagaaccaaacagatatccaggaactaattaattcattgactgaaatttaaaaatacaatagtaagcttcggcagtagactagatgagacagcagaaggaatttcagaatttaaagttgaataaagactatgtgatatatgagtcaccataaaggaatgagtatttgaatttttgatgtcccagaaggtgaaaagaaaaccaaagggatacaaacctgatttaacaaaataatggctgaaacccaagtctagcaagagatttagacatccagatatgggaggctcagagatccacaaataaatagatactattcagaaaggtcttctccatggcacattgtagtcaaattatcaaaagttgaagacagaattccaaaaacaccaaaagaaaagcatctactcacttataagagaacccccatcagactaacagtggatttatcagcagaaaccttacatgccaagagaaaaatgggatgatatattcaaagtactggggaaaaaaataacttgttagccaagagtactatatgcataaaagttacccttcacaaatgaaagagaaataaagtatttcctagataagtaaaagctgagggaattcatctccactggactggccctacaagaaatgcttaatgaattcccacacctgaagtgaaagaacaatatctaccatcatgaaaatgtacaaacgtataaaacccattggtagagcaaacacacaaataaggaagagaaaggacccaaatgttaccactacagaaaaccaccaaacctcaaaaataaacaatgagagagaaagaagggaacaaaggatatataaaccaaccagaaatcaattaataattactagaataagccctgacatatcaatagtaaccttgaatttaaatagattaaagtatccaaaaggatagactggctgaatggataaaaacaaaaacaaaaacaaaaacaaaccatgacccaactataggctgtgtacaagaaactcagctcacttgtaaagacacatgtagactgaaagtaaagagatggaaaaagagattttgtgcaaacagaaagcaaaagtgaacaggagtaggtacgcttagataaaatactttaagtaaaaaacagtaaaaagagacaaagaaggttattgtgtaatgataaagttatgaattcaacaagaggatataacaattctaaacatatatagaccaaacactggagcactcagatatataaagcaaatattattagatctacagggagagacagcaatacaataatacttggggactttaacatccccctctcagcattagacaggtcatcttgacagaaaaataacaaagaaacattggatttaaactgcgctttagactaaatggacctaacagacatttacagaacatttcatctaatagctacagaatgcacattcttttcatcagtacatgtaacattctccaagacagaccctatgttaggacacaaagcaaatctcaacaacttttaaaagactaaaattcgatcgatatcttcttagaccacaatggaataaaactggaaatcagtaatgaggaactttggaatctgtacaaatacatggaaattaaatagcatgctcctgaatgacctttgggtcaaggaagaaattaaggaggaaatttaaaaatttcttttttttttttttttgagacggagtcttgctctgtcgcccaggctggagtgcagtggcgcagtctcggctcactgcaagctccgcctcccaggttcacgccattgtcctgcttcagcctcctcagtagctgggattacaggcgcccaccaccacacctagctaacttttttgtattttttagtagagacggggtttcaccatgttagccaggatggtctcgatctcctgacctcgtgatccgcccgcctcggccttccaaagtgctgggattacaggcgtgagccaccacgcccggccagaaatttcttgaaacaaatgaaaattgaaatacgacatacagaaacctacaggatacagcaaaagcgatgctaagagcctacaataaatgcctacatcagaaaaaagtagaaagatttcaaacaatctagtgatacacctcaaggacaaaccaaacccaaaattagtagaaggaaagatataataaagatcagagcagacctaatgaaacaaagacttaaaaacaatacatgtgttttttggctgcataaatgtcttcttttgagaagtgtctgttcatgtcctttgcccactttttgatggggttgtttgtttttttcttgtaaatttgtttgagttcattgtagattctggatattagccctttgtcagatgagtaggttgcaaaaattttctcccattgtgtaggttgcctgttcactctgatggtagtttcttttgctgtgcagaagctctttagtttaattagatcccatttgtcaattttggcttttgttgccattgcttttggtgttttagacatgaagtccttgcccatgcctatgtccggaatggtaatgcctaggttttcttctagggtttttatggttttaggtctaacgtttaggtctttaatccatcttgaattgatttttgtataaggtgtaaggaggggatccagtttcagctttctacatatggctagccagttttcccagcaccatttattaaatagggaatcctttacccattgcttgtttttctcaggtttgtcaaagatcagatagttgtagatatgtggtgttatttcagagggctctgttctgttccgttgatctatatctctgttttggtaccagtaccatgctgttttggatactggagccttgtagtatagtttgaagtcaggtagcgtgatgcttccagctttgttcttttggcttaggattgacttggcaatgtgggctcttttttggttccatatgaactttaaagtagttttttccaattctgtgaagaaagtcattggtagcttgatggggatggcattgaatctataaattaccttgggcagtatggccattttcacgatattgattcttcctacccatgagcatggaatgttcttccatttgtttgtatcctcttttatttcattgagcagtggtttgtagttctccttgaagaggtccttcacgtcccttgaaaacacatgaaaaaatgctcaccatcactggccatcagagaaatgcaaatcaaaaccacaatgagataccatctcacaccagttagaatggcaatcattaaaaagtcaggaaacaacaggtgctggagaggatgtggagaaataggaacacttttacattgttggtgggactgtaaactagttcaaccattgtggaagtcagtgtggcgattcctcagggatctaggactagaaataccatttgacccagccatcccattactgggtatatacccaaatgactataaatcatgctgctataaagacatatgcacacgtatgtttattgctgcactattcacaatagcaaagactttgaaccaatccaaatgtccaacaatgatagactggattaagaaaatgtggcacatatacaccatggaatactatgcagccataaaaaatgatgaattcatgtcctttgtagggacatggatgaaattggaaatcatcattctcagtaaactatcgcaagaacaaaaaaccaaacacggcatattctcactcataggtgggaattgaacagtgagaacacatggacacaggaaggggaacatcacactctggggactgttgtggggtggggggaggggggagggatagcactaggagatatacctaatgctaaatgacgagttaatgggtgcagcacaccagcatggcacatgtatacatatgtaactaacctgcacattgtgcacatgtaccctaaaacttaaagtataataataataataataaaaacaatacaaatggttaaacaaaactcagttttagggaagatacacaaaatcaataaactgctagctagacttaagaagaataaaagacagattacttaaggaaacaaaatcagaaatgcaaaaggagacattataactgataccacagaaatacaaaatatcatttgagactcttactaacaactatacactaacaaattggaaaacctaggagaaatggataaattcctgaacacatacaacctaccaagattgaatcagaaagaaacataaaatctgaacagactaataatgggtaatgagattgagtcagtaataactctcccaacaaagaaaaacccagggccaagtggtttcactgacaaattctaccatactttcaaggaagaactaaaaccaattctcctcaaactattccaaaaaattaaagaagaggaaattctttctaactcattttatgaggtcagtgttacccagataccaaaaccagacaaggacataacaacaaaaaactacagtccattatccctgatgaacatagacacaaaaatcctcaacaaaaatattagcaaactgaatccaacagcacgtcagaaatataatacaccatgctcatgtgagatttatcccagggatgcaaggatggttcaacatatacatatccataaatgtgatacatcactccaacataataaaagacaaaaaccatgtgatcatctcaacagatgcataaaaagcatttaataaaatttaacatccctttataataaaaactctcaacaaactaggcatagtagaaacatacctcagtatgataaagtctgtatatgaaaaacccacagctaacatcacactgaatggggaaaagctgaaatcctttcctctgataactggaacaagacaaagatgcccactttcatcacacctatttgtagtactggaagtcctagccacagcagtcaggcaaaagaaaggaataaaaggcatctaaattggaaaagaggaagtcagattgttctctttgcagatgacatgatcttgtgtctaaacaaacctagactccaccaaaaaactcctatatctgataaataaatttggtgaggttgcaggatacaatagcaacacacaaaaatcagtagcatttctataaaccaataatgaactagctgagaaataaatcaagaagttgattccatttacaatagctataaaagaaaaacatatctaggaattaatttaaccaaggaggtgaaagatctctacaaagaaaaatacaaaacattgatgaaaggaactaagaaactgaagaagacacaagtaaatagaaagacatcccatgctcatggatcagaagaattagcattattaaaatgaccatactccccaaatgaatctaatgactcaatgcaatctctatcaaaataccagtgtcattttcacagaaatagcaaaaaaaaaaaacaaaaaaccccgtaaattcttgtggaacccaaaaagagcccaaatagccaaagcaatccatagcaaaaataacgaaactggaggaatcacactacctatctttgaaatatatgacaagtctataataaccaaaaccatggcatggtattggcgttaacaacagacacatagaccaatggaacagaatagagcacccagaaacatatccatatatttacaaccaactgattttcgataaaggtggcaggataccttcaataattttggtgctaggaaaattggatatccatatgcagaagatcgaaattaaaaaataactcaagatggattaaagacttaaatgtaacacttgaaattataaaactactaaaataaaacacaggggaaacacttcaggacattagtgtaggcaaagattttatggctaagatctcaaaagcacaggcaacaaaaccaaaaatagacaaatgggactatatcaaacttaaaaacttctgtacagcaaaggaaatggtaaacagagtgaagagacagcctgttgaatgggagaaaatatttgcaaactattcatctggtaagggattaatatctaaaatatacaaagaactcagctcaacagtttaaaaaatctcatttaaaaagtgggcaagggacatgaataaacccttgtcaaaagcagacatacagatggtcaacgtgtctatgaaaaaatgcccagtatcactaatcatcaaggaaatgctaatcaaaacctcaatgaggtaccattttatcccagtcagaatcactagaattaaaaagacataaaaaatgctgacaatcatgtggagaacagggaactctaatacactgttggtgatgatgtaaattagtacagccacaatggaaaacagtataagttttcaaaaaactaaaaatagaactaccctatgagccagcaatcccactattgggtatttatccataggaaaggagtcagtgcatcaaaggatacccataccccatgcttactgcagcaccattcacagtagccaagatacggaatcaacccaagcgtccatcagtagaccaacggataagaaaatgtggtgtatatacatagtggaatactattcagccacaagaaagaatgaaatcctgtcatttgcagcaacatgcagggaactggagggcattacatcaatgccctcaggaaaacaaatatcacaagttctcactcataagtagtagcttaaaaggccaatctcatggagataagagagtagaatgaaagatactagaggctgggaggggtgtgtcggtggagcagggtggtggggagaaagagaggttagttgatgggcataaacattcagttaaacagaaggagtaagttccaatgctccgtggcacagtagagtgactacagctaacaatgatgtatatttcaaaataccaaggaaagaggatttcgaatgttcacaacacatagaaatgataaatactccaggccataggcactctgaacaccctaacttggccgttacacagtcagtgcctgtaacaaaacgtcacctgtaccatagaaatgtgtacaagtattatgtatcaataaaaaagaaagtaaagaaagcttcagactctcgggtgctggagaaacggcctccttttctctttagctgatggtgctgtagttagttccacacccagcaggacttctttcccaaagctccgaggaaatgagaagttgttgggagagggtagcagtaaagaggaaacagaatataaattttaagctgagacatcgccagctgattgcagcagagctagaggacagcatctttgggcaggaatccaggaagcagaaacataatataaaaggagcaaaaaggtttctttccttctccatcgattgaaaaaagaacaagtcagtgcaaaaatctgtcagaatgtctttctggaggctcacaattgtgggaggatgagatggtcttgacagccattctattttaccatcttccacactagaaaagtgaaatttatcagagcatttgagcttatctgtgaaaagtcttttcaaagtttcacccagatgagtggttgttgtttttttttttttttttttttttttttttttttttgaggctgttaccattttaaaaaaattacgacttgtgttagaaggctttgtccaagtaccaactcagtgctcggtatggaattcaccctaaaaatctaatgtttgtgcaagtgaggctggcagtaaccagaacagggactttgcaggggtgagacttctctgtaggaatcctggatactctttcaggacaactgacacccttgacttcatgctctcctattttaagctgaaagacttgcattttttattactaaaaagatttgaatgtggcgccatccagcaggttcactaggggagtcgtgtggtgtggagctttcagtaggaaccagtgttccctgcctggcgtggagggtgtactcagctgatacatacagaaactgacggatgtctcgtctcttctccatcattcttttcctcccttttccccggttctgcctttgaactaccctttcctcctgcccttttctcctccctggctttgtcgctatgtttctcctgaacgggtatctggaggggtaggcatgggggcattgtcagagaggaggtagggctctcaatggcaggcggggaagcagggccaacccgggcagctgtgtttgtgtttgctgctgagatcaatggatggaggggcactttcaggcaccgcacaggtgcctgtggtgcctgacttagggaatgggagtgcactgtctctcttcccctcatccttccctccatttgctcgtaagacgccagcctccccaaaagcgtttccatttccacctgctcctcatgccttgcacagcagctatggctatagagagaccatggaaggcacatggcagggcttgggagtaacggcatccgggagaacatcaccatcaggacatccacctatctcctccagatagccaggcatcctctcctccctccccatcaccacacagtgtgggctggccctgatgggaccgatgggacctgctatgggaacactaaaaggctctaaacctgggtgagctggtgcaagagatgtgggtcagaactgccagatgtccctgctgtccggccagcagcgacttgctgtgggccctgctgtccctgagtcgcaggcaggtggtccatctgcatgtggggcggagctctgcgcctgtggccgcccttcctcaagcagtttgctttgctgagctgcacctgcatcttggatttttaactcatgttttagactctcaggtcttttctctggggtggcatcctctgatcctaggaatgagtttatgttctgatgagaggttcatcatcatgacagcggctgatgatcatggaacattttcatggtgcccgggacatcctcgtgttttcatgttttattacaatttattcttataattgtctcgctgagttatttttattttccctgcttcacacattaacagactaaggtgtcgagagtgtaatttcctaggcagcaagtagctcagccaggtctgacacccagcttggacgccagcgttcaagcgtaactctgcggctctgcctgcccgtgttagcaagggggccgcagggcacagaagctcctgggaaaggaatttgtttttgctgggattttctcaggccactgcctcgcccctctggaatccttcaggataccgattgggtttggagcctggagttctggaccaggttggcaggtgagcctgcccctgggcccagggtccttttctggtttgcacaaggttacagatggcccccacacaagccagacacggggttgcatacaccatggaggaacactcagaggaggcagttgctcttgagaatccagccagcctgattgttctaatcagattagatcaaggagaaagacagagaatggtttgtgtataaatctcctgccaccagtagctccagtgccctgtgtggctgggatgaagctggagaaaataatgtgtgtgatgatagccaggatgccttgaacaccctccttctttctgcattccactgatgtctcctgcagggttttgcagccccagctcaccactttccttccatagttagaaccttccccacacatctgatcaaaagaaaatttgggctattgtgttaacagatgactttgcttttaattggtagaaccaggagctgtgggacatctgagtttcacagagatcttggacacatctctcaaggtcagctggcaggagcccctggagaaaaatggcatcattactggtaagtaggcctgtccttcaaaaaaggaaaagataagtttgtcctcacaaaaagaagtggctgtcacttcaaaccaaactgctgacagcatggacccgtgcccatggccttctcaagaggaactgaaaagtcttcctggccgtgtggcagagtcccagcactgggactgccccagtgagagccagcctggtctggggccctttactgtgtgggcagcagccatagtttgagatctgttctcctcgcatgatcttagtaggtgtccagagtctctgaccaatgagagtcagtcatgttatgacacatttgttcacatgcgtgtgtcttgcttaattctcatagcagcatggtaaggtcaatatcgatattatgaccattttacagatgaggaaactgaggccccgagagggtgggtgacctttccttcattcagcagatggcactgagcgctcctgtgggcagccagccttctcagacacagccaggtggtgtgactatgaggcttacgtgcctgtgtctcagccctcgtcccacagctgtgagccgcaagggtgagatctgggtcttctgactccagatcccatgttctgtcccctccccaccctgccctccagtgagagccctgaggagactgtgaggcaggtacttcggaggaggttctgagctgtaccagggatgggggctgagccttagaggcccctgggcagtgagatctcctctcctggtttgagggggtctctgtgggagacagctcaccttttttagggtttttaatgattttatttatttatttatttatttatgagacagggtcttgctctctcgcccaggctggagtgcggtggcgtgatctcggctcactgcaacctccacctcccgggttcaagcagttttcctgcctcagcctcctgaagagctgggattacaggtgtgtgccaccatacctggctaatttttgtatttttagtagaaatggggttttgccatgttggccaggctggtctcgaactcctgacctcaagtgatccacctgcctcagcctcccaaagtgctgggattacaggcgtgagccactgcgcctggccaaatttttataatgtctctgaaaaaccttttaggttaaagcttaatttaaatcttagttcaaaaaaaaaatcttggtttgacaaaagcaacataggctctagcctcagatgaggctgggcagggccccctgttctactgttttagtcactctaagagcctcagcagacctctgggatcctcagttacaactgaggggctgtcaggaggacgagttgagagaagttgtatcagtggctgcccactgcctggcccagaacaactcagcctccaacagacatctgttttttttctaaacattaccaaggatttctagcaagccacttaatcttcttctctgtcagccatatataggacacttctgtgtcagccctctctgggggctttgcctgtggcatctcatgtcccggcaggggctcctgcgtgggtattctgcagccgcaccccaaggttgagtgagttgcccgtcctgacgcgagcggtcagtttggagctgagctgcgtctccgctccgtggtggcagcgttctcagctgcctgcgggagccatggaattcaagtgcctgattgttctgtgaagcaagcttatgctctctgggtgtgtcctagaagcctgtgctgggactgtgctgcccagagaccaagagcctcaggtgatctctccctcctgccaggctgcagggttgggggccgtttcttctccgcactggcgtcctggatgacagcggcaatgatgaccctggccacttccactgtgtttgtcaccctagccttgtgggatctcgttttgctttctcagcaaccacacaaggggtgtcttataaccgaggcctggcgatgacaaggctgaggtttagggtggtgacgtcccaccatcacagccaatgggcatgtgcgcattctctcctctgcagcgttgatgtggtgggggtgaggtttgaaccatgctctgaaccccacagcatgggatgctcactttccccatccacagtcctcttagcatctccataatttctcaaagcaccctgaggccacagaaatgcctgacggttctgtttattaagtagttaggtccaaacaacggaagtgttaatatgcgctaacaattataattgccatgtaaaaaatactacacagtagttgaaagaaataatacttgcatttcttttttcagtgaccacagttagttcctaatgggatgtctgcacccgcctgggactgcccaccttctcagaccttgggaccagatggtccctcgtcaccctcatttcccggttcactttggtttccaggcagtacttgtttccttatcacaacatccaccaaaaactctgctttgcaaagacaggatatatccaaggactcgtggcatgctctgacccggaaatggagccacctcgggctggaggctcacgtgtgtcccactggcattgagtgtcctgtgcatccctgcagtgctcctgggaggtcactgcagcatcccaggtgccctggggcacagtgggagactgtgttcctacagtgacctctttctacacagaactccagctacatagcaaacccagtgccaaccccaccactactcatcagtagaatctcctgtaatcatctgtgccaaccagatcccctgatagagcggtgtgcccacagcccatacacaaggtcaccttggagccagtgccacctctcaaatttttttttttttttttgagatggagtctcactctgcagcccaggatggagtacagtggcacaatctcagctcactgcaacctctgcctcctgggttcaagcaattatcctgcctcagcctcccgagtagttggaactacaggcgtgagccaccacgcctggctaattgtttgtatttttagtgaaggcgggggtttcaccatgttagccaggatggtctcgatctcctgacctcgtgatccacccactttggcctcccaaagtgtgctgtgcctcttataagcatatagctggactttgtggggtttttaattttttgtttatttattttttgaaatggagtgtctctctgtcacccaggttggagtgcagtggtgtgatcttggctcactggaacatccgcctcccggttcaaatgattctcctgccttagcctcccaagtagctgggattacaggtgtgcgccaccacacccagctaatttttgtatttttagtagagacagggttttaccatattggtaaggctggtcttgaactcctgacctcaggtgatccacccacttcggcctcccaaagtgctgggattactggcatgagccaccacgcctggcctcaccttaacttttaaaaaaagtaaattaatgaatctggctctgccttccagaagcttatcttttgaagtgcccactttaaatagtgtgaaaactccaggaatggggggaagtcactactagaattggacacaatctgttgcacattctgaagtcatctgagaatcgcaagtgctgagtgtgtacaattaaaagggcctcctgttgcctggagtcgaaggaattaagcaaaggcagggggaactgagcaggggagggcactatagactgcaggaacctagtttaatcttgctttaaaccattcaaagaaaggaaaaacaaactagtgggaggagggatttttaaaagctgagcaggaggctaccattcggaagaagaagactttccagttcagacccttcagggaccagttcagtggctggaattagagctctgcttaccactgatcccagaaacggggctgcccgggtaggaaagaaagaattctggcctaccgtctgcccagtcgcctttcaggtctgcagtcggccatgttttggaaatctggcagagactccttggtagatgtgtgtacacagaaggaattccctttttacagatacacacgttagcccctgccctgccctttgtgaacacagcacacacttctttcctgtttaaagctgaaagaaaaaaatccatgggcataataattcacgttgagccaacatttcacggctaagcagtggttgccaatacttccaatttatgatcgtctgtttcaccagctaatggggcttcatgaactcattttcatgttttatttaaacaaatacctgtagttaaaagcagcagtctgttgtttatggtggagcttgacttcgaagctcgagctttcctgggctgggtgtagccagaggcctgggtttggaggtgcctgtgctgtcaggggcagcaaagttgcagtgagagcaccaggcagactctctgcaggttcctctcggcagccacgttgtccccttctgtgtgtggcctgtgtgttttcccttcctgctcactgtaatgtgcaccttgtgtcacagaagctgcagtggacgcctgcagctctttggaggagaaggtcctagaggagatgagatcggatgttatcaccttaccagcccagcatcaccctgtgcccccagtgatgcccgcatcaggggagctccccccagcacccaccatgtagacatagttttccagtggaacatgctggcagcaccatgaaattctattctgtgctgaaggcagagtgtctcattgagaagagcaaaagaaaaactgtgttcgtgggcaaacctggctgccggtttctggaagtgttggtgcggcaccaccatgctctcgcaggcttcctgcaaaggctgcacctgctattaaaggcagctgcaggagcccaggatgactgacggcttgggcctgggctcagcaccactttacgggccagaggcgctgttggaaacgtaggtttattagccctggtctgtggtgagcacccccagcttccattttaattcgaggcctggaatgagagggaagcacggagtagggggcggctgcgcctgcccgagtaaattgcccattgcccgctcattgtaaatttcagcgtcctccactctccttcagtaaactctgatttatgagggccaggatgcagacagacagtttgtgattggatgcactgctctcttctagagaatttactttagatcaacagaaaattatttctgaagctcctctggccattagtctcagttaggcagccattgggagcaggtaggatgccaagcgggaggtacccccgctcctggctccgggcgcctctctcctctctcctctgggagctggaagcagaggatgcatcccctggccagcactgcctgagccctccacgcacctcccccaaaagctgttgttcataaattaggggacgtctttcccacctcacgcccaccactctgtctgtgctcacaggcatcacacgtcttgggcctgcaccatttctgctggcgtttctctgcagatcagcctctctagctatccgtttggtttttgtttgtatccacaaccatttgagcacactatattatcaatgttgatcctaataaattctatcaacactgctcttcctgaagatgctggaattgccgtgtttcagctctaggtcgacatgacaaacatgacgctgtgtttcagtaaattctgatgaaaaacagcttttaaacaaataaaattttctggcagacaagttgtaatattaaacaaagtctgctcttcccataggttcagagtagaccccgaggatcaaattatttagcgattgaccaggtgtgacccaccaaggtcagggatgtctcagttcccttgcacacatcaggaggaggtgctggaggaggaggcgctttgagagcagggtctcgtgcaccatgagaaacaaactcacccgtccaaacccaaagaatggactcagagacccggagaacagcgaaagtgagacttttaatgccggtcttgcaagatcgagtgtgtggtgggcaggcacactcagcacggccacaacaagcgatttatcccctagtgctcaggcccctctcccagttcctcataggctgagcactatggggtggggcgggggaggtcacagtcttcccggacatcgcctattggttgttgggcagggggccgtaggtgtttttttagggttgtcctgttgcattttgttgcagcccacaatgcactgcaatcctagtcagctcagggggtcttcaggtatttgacttacgacctaagtagctgggcaggctgataagaacagacgaaacgagctattctgcaggatagtaaactttcatcttagactaaacttctttggttggggtggggacaactgagggattgggggaggctgagaagcaggcatttgcgattgaagcaggggcttagtgtatcctgtttcttctgtagtttgctgacctaagctgattcaaggtactttgtcttggaaacggaccatgtatccattatttccttcatccactgagggctgtcttgggttccagcaagtccacgaagctttctgtggcttggtttcttcctttgtgaaataggataacaatggctccaatttcaaaggtgtgttgtgagggttacatgaatgaatggggcaggctagatgtcttagacgtcagggtgggcagatgagggaaatgctaagatgtaaagcgagggcagggcccaggctgggcgtggtggctgacggctgtaatcctagcattttgggaggccacggtgggaggatcgcttgataccaggagtttgagaccagcctgggcaacacagtgagaccctcatctctacaaaaaattttaaaaacttgccaggcatggtggcacatgcctatagtaccagctacttgagagactgaggtgggagaatcgcttgggttgagtggttcaaggttgcagtgagccgtgatcaccccactgcactccagcctgggcaacagagcaagactttctctctctctctctctctctctctctctgtatatatatatatatatatatatatatatatttttttttttttttaataaagttaggaaggaaatgggagaaggcaaaaatgagtggttggcctgggtagtcggccttctcccctctccctgggaggaggaaaaggagaccaggacctgagaagcagccaggcgcctttgatgaagacaccacagaggatggtttagtgaccctcctgggcccaggcagagaccccaaaggcaggcaggcagcaccacttggtgacaactcacaggatggcaggtgctccaagtgctctggaggcacccagcagccaggcctcccctctggtggcccttgttccttggagctccccactgcgtccgcccacacgggagtcccctcagcccgcacacagaagctgccaggctgtacggggcctgtggcacggccagggggagcagtttacgacattaaatttttttcaaaatataaagtctcaagatgctgtcctctaaattcttgtttacctgcaagtgcaactcctagctttatttattgctttcatcagaatgaggaggaagtttcaggtgcgtcctagcgcttctatatccctgaggttattgactagaaatagggaagagcaagcgttttcagctgttttcttttgcctgtggacctatgagctctttccaccactgtctccctctttaaaagacacttttaagtgctctctgatcacattaactcccctccacgcgggttgattgattcaggagctagttgggtcttatttctccttttttttttttttttaagacaaagtcttgctctgtcacccaggctggagtgcaatggcgcaatcttggctcactgcaacctccgcctcccaggttcgagtgattctcgtgcctcagccttccgagtagctaggattacaggcgcccaccaccatgcatggctaatttttatattttagtagagacggggtttcacatgttggccaggctggtctccaactcctgagctcaggtggtccacccgccttggcctccccaagtgctgggattacaggtgtgagccaccgtgccccgcaggtcttttttctctaagccccaagtcacagtggaatcccaggttgaataaattttcgtcatgaggccccactggcctgaagagagtatagggggaaatcaaatttattagaaaacaggatatatgaaaaggggagagagagctagaagcaaaactcacacactcaggtgaaaataaacttttccagtgcattgcaaaatgtaagagtaatctgtcagtcatttcttgaaggaaaaagtagaagtgtttccatgaattagttgcaaccgaagagcaagccattgatttaaggtacaaaaaatatcggcttccaaaaatgaaatgattggccgggtacagtggctgtaatcccaacactaagggaggccgaggcgggaggatctcttgagcctaggaattccagaccagcctgggcaacagggggaaaccccatctctccaaaaaaatacaaaaaattagccaggcatggtggttcacgcctgtggtcccagctactcaggacgctgaggtgggaggatggattgagcccaggaggttgaggctgcagtgagctatgattgcaccattgcacttcagcctgggcaacagactcaaaaataaatagatagatacatacatacatatatacatacataacattttttagtggaattattggtgaaatgcattcataatttgacaagagaaggtcgaattgagcacagcaggctggcagctgtcgtcatgtttcagttcacgcacctggtgctgaggttaccagagcatcccagaggccctgtccttatgaagctcgccctggtagggagggatggtcccctgtggtgggaccgtcactcccataagcaggtttacgagatcgcattgggcacacagaggaaggagccttgacctgtgtctcatgtcagtagcacagtggctctaagctgccttcagcacatccagccaagctctccatagctccaagcctgcaacgatggtgctgtggaattcaggtgagcccttggccttcaggagaccaacactggtctggtcctgttgctttctaggctatcagatctcttgggaagtgtacggcaggaacgactctcgtctcacgcacaccctgaacagcacgacgcacgagtacaagatccaaggcctctcatctctcaccacctacaccatcgacgtggccgctgtgactgccgtgggcactggcctggtgacttcatccaccatttcttctggagtgcccccaggtcagtagaatcgtgtgcggtcctcctgctgtcacctttctcttggagattcccgaggctagaagttgattggcactttggtgtggaagccactgagtgccttgaaaaggagtagtggcctcctgccaagatgctggagggtaaatgggtgttgaccccacttcagccccattctccagagcattccaccacggcctcacgtcccttctgtcttcccctcctgctttggcctcagccagttcccagaacatgcgttgaaagtgtttaaagccagttcccaatgcatatctaaaatgccatgaatactttcaaaacagtagcgatgattgtattagtccattttcatgctgctgataaagacatacccgagactgggccatttacaaaagaaacaggtttaatggacttacagttccgtatggttggggaggcctcacaatcatggcggaaggcaaggaggagcaagtcatgtattacatggatggcagcaggcaaagagagagcccgtgcaaggaaactcccgtttttaaaacccatagatcttgtgagacttattcactatcatgagaacagcacaggaaagacctgcccccatgattcagttacctcccaccaggttcctctcatgacacatgggaaatgtgggagttacaattcaagatgagatttgagtggggacacagccaaaccatatcaatgatgatggtgtgtggtttaattgggtaaaaattggtatatatagcgaccaaggttaacactagaagcacatctgggtgcaagttaccagagttttcctgagatgtcttggacattgtttatccagggcagggaaatgggttagctgacctccggaaggctgtgcttccagaaacactctgacgcacactacgtctggagccacagagtggagtgttagaggggaaactgaggcctggctgctttggccaaacccctgataaccaaggtgcagggaggcactggagttgctgttccgtcattgccaaggctgaacgcttgtagctggagaggggtcttaaagccttacccactcatcctgggtagtggctggaggcaaatcaaatggcgaggactgctttggggacaccatgttctgtttaccgtgcttgaagtttatcgccattaatgattgaagaaccatttaaaaatccagagagctgagaaataggaaagagtccacttgtccttcaatttaaacattttctatttcaaattcattaaaaactagatgtggaaaggacccttgagatcctacagaccctgcccatgccgatactgaattgatcaccaaaatagtttcattgtccctgtgcaagacctggtttcaaacaccccaagcaacagcaaatgaggaaagcattcctcagagatagtgaggtctgaaagctgccctagccttgcatttttcttttctttttcttccccattttatccccttatctttctctagagtattttgcatggcacagtaacacgaaagctctcgttttgaactcataatgctacaattccgggtgggagatgctctttggggagcggcatctgaagggtctctcatctaggagtaggcttgagccacgggcaccctcaacgggaggctcattcagaacccaccttccaccttatccagttgcctgagcaactgaatagaagcagagaaaggagagttctgcacttgcacgagaatttgttcgtcttggaaacgaaatccaagaagcctaaggctcaagacctgatcctgaccgggtgtcacgtcgcctgggagcaggcgatcctgaccgggtgtcacgccgcctgggagcaaccctgggcctatgcactcttccctccatccctccgaggccgcggtaattatgaaaggaagtacggcccgctcgttctctgtgtggtttgaggagccaggaagaattacattcattcatcctttcctcattcagccagcatctgttaattacctacgaagtacagagatgcgtaagacatgacgtgtgcctgcagagtttctcatcagggaggccatgttagcgacgtgtctcccaaagcccactgggtcaccccattaaagcaaaaaccatgcactgatcatgcccctggggaagctgtgctgcttctcaccttcatggttttgagagcaaatccttttttggtatagaatcgttttgaaactgtttacttttgaagctgacacgtttgatacctttcctaagctgtgacggactgtaaatctctccctttcctccctggttcctctctagaccttcctggtgccccatccaacctggtcatttccaacatcagccctcgctccgccacccttcagttccggccaggctatgacgggaaaacgtccatctccaggtggattgttgaggggcaggtacgtgtgtcgttagactgggagctggcatttgcgaagagcagtgttggggcctgtgaatgagtggtacccctgcagatgatggcttggggtgtcggggagatgggtgtgcttggagagggagaaccaggggctggagatagcccagataccagggcagaatgtaggaagacaaagaacaagatgtcaggccggggtcctaccaggtgataagacaaggataagaagggttaaaatgaaagttgtgattcaaaataggtacccaaaattggatagtgtcgttgattgagtttttaaaaattctatatcacaattagctactaaatatactaataggattaattgcttggtacagcttgtgtgtcattagctatgcattcattcaacaatatttttagagacgattgttctatcagcaggcactattctgagcacgggggctattgcagtagacaaagctggctgagtttctgctgtcgaggagaaaagtgctgtctgggaaagaaagacctccagctgtgggaaagctgttatatttgagggacagcgaggagggtgggtgctggagggaggggagcaagccctgcggtggcagggagtgagtctggggagagctgggggcgggttccacaggacttgagagagtggactccgccgagagacttccggtccgactccagctgtgcaagtgctggagcacgcaggggtccgggacagtgccaggcttgaataggatcatgctggcattggtgaagccgtgcaatctgccacttccatgttccaataaaagcaggaggaaaaagataaagggccaaattatgaggagtagtaaagtttcaaaatagttattatctgtagtaaaatccttgtggttttcatgactgtacttatgctatactgcaagacgatccactcctggaaattggccgtaaattagggaacaaatcctatctacctcttcaaaagtttcattaagcaaacatttctgaaagtctaaggaggatcctgaaggcgcaaaccatctggatgggactgacccacaaatggggctggaacaattatttacttaggaaaaatagcagtagagccctacctcacatcatcacacaccagggactgttgtggcgttgagggggtggggagggatagcattgggagatacacctaatgctaaaagacgagttaatgggtgcagcacaccaacatggcacatgtatacatatgtaacaaacctgcacattgtgcacacgtaccctaaaacttaaagtataataataataaaattacaataaaaaaagaaaaaagaaaatcagtcttcagcaaatgaagactaaattgatgaaagcaaactttaaaacgcttaggattaaatataggacaagaatcacaatgtctcatgaaaaccaattctactattaaaatccatctgcagaagtagccaggcaatacttttaggcccgcagaagcacgcgctgtggtctttggtgtctgacgatgccgcatagctgaggccaggaggcagcgctctctgcaggctttagaatgtggtgttacgctagggctaggcaggccacagcgacagaaacgccagcgtcttcagggctcaacatacaaaagctcatctgtgcatccaggcaggcctaggagtggatgacgctcctttggcccatgttccgttgcccagaacttgggcaacgtggccctgtgtcactgcaggagagtctgagagtgttgcatttcagctcatctgggagggaaagacaaggagtgatgtggggaccctcaccacagtttcttggccatagtatcctagctttatgtcatacaacctgtttctttaatttttttttttttgagacagaatcttgctctgtcgccaagctggagtgcagtggcgccttctcagctcactgcaagctcttcctcccaggttcaagtgattccccctgcctcagcctcccgagtagctggggctacaggcacccgccacccacccagccaattttttgtattttagtagagacggggtttcaccatgttagccaggatggtctggatctcctgacctcgtgatccgcctgcctcggcctcccaaatcgctgggattacaggcatgagccaccgcacctgacctgtaaagaggttttacatttttaatgtaaaacatcttaaatatatgcaaaaggaagaatagagtaagccctcttatacccatcagcaaaagtcaatgatcctcaagattttgctgcatccatccatccctggttttttattggcgtattttgaagcatatttcagaccacatgtcacttttcccccatacacatcacacatgtgtctaaaatgcctgttcacatgccaatatggatgaatttcacaggcataatgtttaacaaaaggaaaaccagacccctgcttggagcatatactgtgtgattccatttatagaatgttccaaaacaggaagaagtaatctttggtgttggaataacaggttttcctgggacccttgtggttacttaccgtgggggtgacagtgactgggagggggccacctgaggagggggcgtctggaatggcaggagtgctgtcttttgatctgggtgcttattttgtgtatacaccagtcgtctgtgagcttgcctgtatgtcttacttcagtgaaaactttggccaggcgtgatggctcacacctgtaatccacactttaggagaccaaggcaggcggatcacttgaggttgggagttcgaggccagcctggccaacatgtgaaaccccatctctactaaaaatacaaaaattagccaggcatggtggcgcacgtctgtaatcccagctattcaggaagctgaagcaggagaatcgcttgaacctgggaggcggagtttgcagtgagctgagatcatgccactgtacttcagcctgggcaacagagtgagattctgtctcaaaaaaaaaaaaaaaagaaaagaaaagaaatttttacatgaaaatatggatgtcttttctcatgataccattgtcacacctgataaaattattattatttttttgagatagaatctcactctgtcacccagacaggagtgaagtggtatgatctcggctcactacaacctctgcctcctgggctcaagcaatcctctcatctcagcctcctgagtagctaggaccacaggcgtgtgccaccacaccagctaactttttatatttttggtagagacagggttttgctgtgttgcccaggctggtctcgaactcctgagttcaagcgatctgtcagcctcggcctcccaaagtgctgtgattataggcatgagccaccgcacctggcaatttgaacattttaatatcatctaatagtcagttcacactcagattcccccaaattttccaaaacatctctttacggtggttttgataaaagtaggattcacgcagggttcacactattcattttgttgtcatgtctctcaaattgttaaaaaaaaatgttaacagctttattgagttgcaattgacatacaggtttaaactgcatatatttaagatggacagtttgacagcttttgacttagctacacatatacacacacctgggaagctgtgaccacagatgagataatgaacaggttcctcaccctcaaaggtgtccttgcagcccccactatccctccctaccaaccctccccgtccccacaaccactcatctgcttcctgtcactataggttacagctctgttaatctagtggaatcccccactcttttcccccatgcagttgcctcgttgagaaaacccagccagtcatcccatgggacatctgcattggagatgcacctggttacatccttgtggggtcacttgacctgttcctctaccccgtttgccctgtaaactggaagttcattgcaaagaactggtagattccatttccactcctccctccctccctccctccctccctccctcccttccttcctttttgcctccctcctcccttctttccttcttctctccctcccttctcttgtccctccctccctcctttccttccttccttcctccacccctcccttctttcctccctctctcccttcacttcttccctccctcctttacttcctccctcccttctttacttcctccatccctcccttcctttacttcctgtctccctccctcccttctttcctccctcctttcctctctccctcccttccttcctttcttcctctctcccttcctctctctctctgtctgtctccctccctccctaagactgcttccctgttactacagcagggtgggggcacgtaggtctagtcgccccactcagggatgctaagttgggtggcagagcgtagcagcctgatgcctaccttgtgaatttctccatcagctttttatctaatggtctcatccatccatgatctttgcctgaattaattatgttcttaggatattcaagatgataattttatatttctatcagtctttcctcatttagctgttggaactctaaaaagaagcatctctgctcatccctcagactatttagttactctcaaatgcaggaaggcagaataaatgcttaattcttttcccttaattaccagtttccagggtgaggaattggtcccctggttacttccaatgttaaatagatttttctttctttttctgtcttgtgatctcttttgctgagtatcatcatgaaagcataggttcttacctgttcagtgggtttcagtcacctgcagtcattattctttttgaacctagaattggcctgtctttggcctagggaggctttcgtatcctggggctccggcatgaggctccactctttgatgacttcctgcctcaagctgagatggagccatgcctgcagggccttggtttcatgagtgtcaaatgctgtttaaagacgataacctgagcaccaaggtggatctcctcgctcccagctggtccctgcttcgacaccttcccagtagacagaacatattttctgaagcatcatgagttcatactgacgtttccaatgaaatttcaggttactgaccttaaatgtatatgttatgttacgttatgttatgttatgttatgttatgttatgttatgttatgttatgttatgttatgttgttacttaaatgtatattttattttattttattttatttatttatttatttgagatggagtttcgctcttgtcacccaggctggagtgcaatggcacgatctcactgcaacctccgcctcctgggttcaagtgattctcctgcctcagcctcctgagtagctgggattacaggcgcccgccaccacgcccagctaatttttatatttttagtagagatggggtttcaccatgttggaccaggctggtgtcgaacaccttacctcaagtgatccacctgccttggcctcccaaagtgctgggattacaggtgtgagcccactgcgcccagcctaaatgtatattttaaatatattttcccttactctaagactgtgctttttaggactcctaactcgattatcttctttatcctcctattgtattaagaggttcaacctgtggtctgtgaatttgcctgtgtatcttacttatatgaaaactttatgttaaaacacaaatactattaggagtttcaaaattataatctcagtggtatgactaacagagactactgaatgaaatttaagtatttgtccttaaaatgtgttataccatggaagtgtaatatattcagtttatacctacagtttatattcagtttataatatatttagtttatacttacagtatacaagtacagttgcagtactgttctaaagccactgttcttttctcattgtggttatctcgatacagatttaagtgcgttcatttcaggacttgttttgtttttttgcttcaatttttagcactgactttctttaaaaatcattttacattttttttatttatttattttgagatggagtctcactctgtcaccgaggctggagtgcagtggcgtgatctcagatcactgcaacctccacctcccgggttcaagctattctcctgcctcagcctcctgagtagctgggattacaggtgctcgccaccacgcctggctaatttttgtatttttagtagagatggggtttcaccatgttggccaggctggtcttgaactcctaacctcaagtgatccgcccgcctcagcctcccagagtgctgggattacaggtgtgagccactgcacctagctcattttacattttaaaaaattggtggaggattttaaactaattcttgaggatataactcatttacacgatctcaaagtcaaaactatttaaaaagtgacattcacagaagtttctgttcatttgtctccttaccctgttgcctgtctgccacatagataaccatatttattagacttttggtttttcctttttctttttctttctggcaacataaacagctctgcgtatatgtgtacttcctctttcttccacggaaggtggcatattgcgccttgctgtcttccggtgacagcacatcctgaatacccctgggcatcatgtgtgcacttgtcctttcttctcacacctgcacaggtctgcccggtgtgcatgagctggggtttgtttatgtagctagtcctctgctgacacgcattgggatgtgtattagtattatatcactgccataacaaatcaccaaaaactgagtggctgatacaacatacatgtgtcatcttctagttctgcaggtcagaagtccagcatgggtctcaccagagccatgtttcttccggaagctctggggatgagtcagcttccagggtcattcgggttgcggcagaattcagtccttgcagttgtaggactgaggtccccatactgtgctgtcagccatggtcattcccagctcctggaggtcaccacggtctgtggctcgggatccccttccttcatcttcagagcagccggggcaggtcaagtcctctcagactctggctctttcctcctccttccttctcatctctctggcccactcttcagcctcccacttccacttttaaggactcctgattaccttgtattcacctggataacctccctgatgtaaggttcttacccttaatcacatctgcagagcctctcctgccacataaggcagcgtactcatgggttccaggaattagggtatgggcatctccagggggcctcattcagcctcaagctagttttcagccttttgcatagtcattttgtatttttgccactgtatctttgggggagattcccaggcatgggttggctggatcacaaggcaaatgcacatgtaaacttcccagacattgccaaatccctcttctgcagatggtaacatgttgcattcccagcagcaacatgtatatattttttgccatgcaaaaaaaaaaaaaaaattgaagtctaatttatgactcctttcttgcatgcctctggtttttgaatcataggcagaaaggttttccccactttcaggttctaaaggaacccaaccaattttctggtttcatttttacatttagaactccatccatttggaactggttcttgtatatggagtgaggtatgaatccattttcatcattttgcaaatagctacgtaattgcctcagtgccatttattaaaatgaccattttttttcctgatttgtaacattaaattctcatacgcactttggtctatttctgaacttttcattctgttctattagcctggttattcatgcactaattccacattgtttacttagagaggctttaaactatgctttaatatctggtgaggcctgcttccccataaccaatgtgtgtgcacagacacacacgcgcgcacacacacacacacacacgcattgcttgactttcttaggattttcccggccactcttgtggacatctgatggtgttgaatctttctgttcaggatcatgctacctcttttcacttgtttaaatctacttttctcagctgttttctcttggagaagcactgggctctctaatcctgccttcacctgctctcaaaaaggcaggaaaatgaggggcgatcaatatacctcaaaagctgtaatgtgaagaatacgggctttgagtcagacagacctggttccccccttttttagcacccctgtttcccagctctgtagacgtgcttcttaacttctttgtgagcctgaatttccatctggagaatggggtcagtagtaccatctgcaaggttgtcatgaggattaactcacgtatggctattttaaatgatattttctgcctgtgttgtttgcataggggaacacaattgatttttaaatatttttgtttctttaataaattcttctgtgttctaagtgctttcacaactatgaacacgtttaattctcataatggctctctggtggctgttataaccccgtgtcacagatgagacatcaaggtgttggattacctgccgaggtcacacagccaagccatgaagccggattggagcctgcaaacctcggaagtctgtggctgctcagcctggtgtattggtgttacagccagaaactttgggaattctcttgttagttggttagttttactgtaattttctataaagaattcatatcatctgttaatggcgacagtttttgtttcttcctttgaattttttatattctttctttctcttttttgtttcttcttctttgagtattttgtaatcttactgggagggctaaagcgtcttctatcatatcgaattgggacaatgatagaagacaatctttgttttgtcactctaaagaaattattgtaagattttatcatcaggtatgacatttacaccattgatgtaggctttttaaaaaatatatccagcctgtattgggttaagatgattcttttctgatcctgatttcctaggagttggttttttttttttaaagcataaataaatttaattgcatcagactattttctcatctattgagctgctcatttggtttttctgatttcatctgttggtaaggtggttcacactgcccttctgtttcactattccggagctcctgagacagaagcaatttggtcttgatgtttgttttgtttggggttgagattgttgtatccatgttcataagtgaacttggccttttctggttgtagatttggcctgggttttaagatcgatagtgtattttctcaccagttttcataaacacagtttggattgagcttgtgttccttagccctcaggcagaggactctcgtgggcatctgcacaatgaggtcactcaggcggaggtgagacccttgtgggcatctgcacaatgaggcccctcagagggaggtgagaccctccctcaggtggaggtgagacccttgtgggcatctgcacaatgaggcccctcagatggaggtgagactctccctcaggtggaggtgagaccctccctcaggcggaggtaagaccctctctcaggcggaggtgagaccctccctcaggcggaggtgagaccctccttcaggtggaggtgcgaccctcgtgggcatctgcaggatgaggtctctcaggtggaggtgagaccctccctcaagtggaggtgagaccctcatgggcatctgcacagggtgctcagtgcctcccaatcctgccacacgttgtgggtgtggaggcgcccagaccccgactcagttcatcagaacccctggggcagaggctgcagcactcttccatttgtgaggcttggaaatgacagatctgcatctccgctgagggtcccgcctcagggggcctctgtgctgggccttggaggcaagatgtgctcaggcagcctgtcccgggctgctattctccagcagttcagaggttttagtgctccagggaagaatgaacggggcaagcttcctgccttccccatcgtgggcttgccccttccccaggcctgtgttggttgcacacctccctgggctgtctctgagtgtccagggcagggaagctccgtcacgtggagcccacgtgtgggtgactccctggggctgcctgactcctgggccagctcacagcctgcagccagtggttaaacatttcatgtggaatttccaattcccttgaagggtaatctttccctttgatttcaaaagtgttttagaaactatagacaagccttaagaatcctacagagaattcccctccacccaaaggcctcatccatgatttgcccagttttccccaaaagccctcggtaacaaaaggctccactccaggacatgggctgcacccagtggtctcctgtgatctcagttatttcttgacttctgtgaccttgacaattttgaagactacaggccggttatttccctgattcccctcaatttggatttatcccagtgtctttaggagtcgtcctaggtgacgcatttttggccagaatgtgggggaagtgatgctgggcacctcctgctacaccttgttgggtttgacttggccttggcatgtcccgttgttagtccagttattttgctaacttgactgagatttctcccctctaaaatgaccgccacttctgcaccacccactttacaattaatcagtattttgtgagaagatactttgagattctttaaaaacctcatttctctttccagtctcatccaccagtttgtcatccattaatatttcttgctggaattaattagggcaatgagggcaccagtgattttttaaaaattcaatcatttcttctacatttatccattggcctattcctgaaagcaaaagctttctcctcatttatttttccattaattatcatcagtgtggactcatgactttttattttgggtaacagattttaacccattgctatcattgctaattttgatgctcaaacttccctccatttggcgatttgggggtggcggggagcccatccagctggcttctgtattcttttgatgtctccatcattctttgagcacttccttatcttctggcacaagatgttcccaactcatcttgttctttctctcttctttcccagccatttctccagggaaccttgggttagtgcagtggagagtgggatttagaaaccaagatccaggcagtagtgtgctcattgctactggggcatcactgctcccagctaggaaatgtacatatatctatagctaggtcagtttctatatctagccacacatactgaaaagcattatttcacactatcacctccaaatacaatgcaaaaccctcagtttatgtgagcttcccttttctacatctatccgagcccttctctggctcccagtatgctcagtatatttatttttttgctgaattccactctatgtggccagtcttatgatcaaagtgggctgctgccctgcttggacaccattctgcttggatgccttctttgcccagatcctgacccctgactggactctttcactgctgcccttaaaatttttgcatataaactgaagttatcaaagtctaacatgactgcactatcttctttccaggacttaagtacaggacttaaaaattcctgaagtccagtcaagtcatacttgttatatgtccagcacatcaactctgcctcacttttctatatctacaaaggcaatgatccttactggggcattctgtctcacagtgagtgctggcttagatttctccacatttgccattttcttttcttttcttttttttttttttttttttttgtttgagacagagtctcactctgtcacccaggctggagtgcagcatcaggatctgggctcactgcaacctccacctcccaggttcaaatgattctcatgcctcagcttcctgagtaactgggatgataggcacgtaccaccacacctggctaatttttgtatttttggtagagatggggttttaccatgttggccaggctggtctcaaactcctgacctcaggtgatccacccacctcagcctccaaagtgctaggattacaggcgtgagccactgcaccctgccaacagcaaggtatgcttttaacaatgatgaatgagcaggcatctctttaaacaccttctgagggtgtttcactggcaggccagtgtagataagagctgctgttcagccttctacagactcaagcagaatatactccaaccctctacatcaccagccaacacctttacagctccgtccagggaaagaacagttctgcagccccctcttctcattcttaatgccggaattctggccacacgttcttctggggaactccacactgcttctctccacgtgccaccttcctggccttcatcacattccatggatcatctctgactcatcccccaggaaagacatcgtgacaagcagcgagcagaacaaaaccgtcgggcgtgtagacacaagcagcacaggctttgggatcacagcgacagggcccggaatcccagctccatcactttctagctgtgaggctttagggaagtcttttaggtcatgttctttagccataaagccctaataacagtgcctgtctcacgggtgattgagagaactagaacatggtgttacattgacttctgctttctgtcaagcttgagcaactttacgaatgcatctcctctgagaaacctgccagcccctgaggctgtctgtggctctgtcccagcctccctctgtgctcgcctaccccctgtcccgtggtcctcccaggacgcctggttctcattccccagccacttctctgagaatgtcccatgggctccctggtccaggcaggctccagaggcacccatgaagcccagctgtcctaaactccaggcagcggggcccttgaggctgtgactagtatagatgaggcctctggggcctcctatacctcaccccctttgaatgggatgcaagacaaacccaggccttctctgctgtagggagactccagggctgcctctcacagcctctcacccgggaagcggttgttgactcctagtctgtgcctggccctgggctagaatttggggaggagaaagactccggagcacatggtctagatacaaagtcattaatcacatagaagccagggaggtgatgtcagagaggtctgctggggcgccgggaggacactgaggaaggaacaatagaacccatcagttgggtgtggagggcccaggaaggtcctaacagccaagccccgtctcgaggctctgtgaacgtgagcccaggcggagagcagcagagcagggcagggacgaaagctcccaccacaacactctctgccagaagagtgttcacgtttcttccctttcatctacttttcaattgtatcttctttgcagaaaagtttcctttagatgctaaccatttttaaaagtgcaccaagaaggttttattacttagagttaccttcagtgaattatggaatgaaggatcctaatcattggaggaacccattgaaaggccctataataagttgatgctcagatgtgggttgccaaaaaaaaaagcagcagcttttataggtatttctggctcagtaatgctttgcttaattagtaacctttgactgtagagtgagcaaaacatctctttgagcatttttatggtgcaccataaaagggagaatgcaaatgttatatgttttcatttgccactcctgtttgtctgctcagttacctctgtaaacccctgccattcgcagccatttgctgtgctctaatagccaaaataacgtctagtcttctcaaaagcctgccctgagcagagttttccataatgaagatgctagtggtaacactttaggtacagctaaaactgttttcattctgaaaatggaaagcaaaaaaaaaaaaaaaaaaaaaaaaagtcccacttagtgcttatttgtgcataatagtagccattttcttagaagaaactgttttagaaagtgttatgggctaataaagcacaagtctgtttagtgctggtctctctgtaactaaagagtagtggagatggagcagccgggcgcccaggcgtccccaggacgcttagagacgccgaggctgccggcggcgtcgacagcgacagcgtttggaatgacgcatgcctcggtgaagtcgggggcgtgaagcaacactgtctctctcctaagcacacgctgtgccgagggaccggatcctgggctgatggatgggaggccacgggctgtgtttcattttgctgtttgctgaggcactcacctgcgaggacaccttgcaggatgtatggggctttctgtttctctagcacgtccttggtccaaagcctcttgcgatacacctctcccagaggtgaatcctggggaaaatgtcgtctcagcagatgagtgtatctgctttccctagtcagaagttgaagcccatacaatccgggggcagtcccctttttgcctaaacggccagggtggttttttttgtgttttttgctttttttgagacggactctcattccgttgcccaggctggagtgcagtgatgtgatctcagctcactgcaacctccgccttgtaggttcaagcgattctcctgcctcagcctcccgagtagagtggctgggattacaggcacctgccaccacacccagctaatttttgtatttgtagtagagagggggttttgccatgttgtccaggctggtctcaaactcctgacctcaaatgatccacccacctcggcctcccaaagtgctggtattataggtgtgagccaccgcgcccggcccagccgggggtttgaaagccaaatggattgccctggaattccggggtgggattgcccttccacagaacttgcttctgctctactcacccctccaatccccatgtgctgacattcgctgtggtccagtgctgtgctaggcacaggggcctctgaggaaagtacaaggagaacctgccttcagtgagtaggaaagagagactcaggaaagaagcaagataccaagacctcatggcaggtggccatgcctcagagggagaagcaaaggaccgggacctcagaggaggtttcctttattgttatcaaaccggacttgtggacctccctggcacagcaaagccaaaccattgacatcgggattgcagcgagagaaagtgaggtgtgtctttcagggcaccaggccaggagaatcgggtcactcaagcctaagacctgacctctcctatggcttacagtaaggatccataaaggcagagaggcagaggcttcaggcagagtcaagcatcaggacacggaggtgacacattggttttacctaaaaggacatcttaaagcaggaacccacaggttataggtaaattcaaagattttctgatctgtgatcggttaaggaggtgaagctttgtcgaaacattttggatcagcagaaaagaacgttagctctggcctgagggtgtgacttcctccaggctccttaggaagaaatttagaacaaacagcagaggtcagagttccatcctcagctcctccatatctgaggtcttcctcacctcccccacatctgagctcttcctcagctcccccacatctgagctcttcctcagctcccccacatctgagctcttcctcagctcccccacatctgagctcttcctcagctcccccacatctgagctcttcctcagctcccccatatctgaggtcttcctcagctcccccacatctgagctcttcctcagctcccccatatctgagctcttcctcagctcccccacacctgaggtctatgtgtagcggacctgcatagccaacccatttggtgggagtccgggtttctgaaaaacaactcagggacatatggtaagatgtcactttagtttctattgggaaccaagcatctcctgactctggcttccttggctattgttttcagctactttcaccttcttgtttgtcaagttgctcctttatttatttatttttaatttttatttatttatttatttttttccgagacggagtctcgctctgtctcacaggctggagtgcagtggcgcgatctcagctcactgcaacctccacctcctgggttcaagcgattctgctgcctcagcctcccaagtagctgggattgcaggcactcgccaccacacctggctaattttttgtatttttagtagagatggggtttcgccgtgtgggccaggctggtctcgaacttttgacctcaggtgatctgcccgcttcggcctcccaaagtgctggcattacaggtgtgagccaccacgcccagcctcgctcatttacttctcagggctagctaggtgcctggaatttcccttgaaggaactcaagatttttctttatttccatgtttgggggcccaccagtccctaagaggggttcctgctccatctcattatgaggatcttccttggaaaataggcagtgtggacatgtgggtagaaacctgtcctgaaatgtagctgtaaagcgtccactttcctgtgcatgtcttctctgtgatttgctttcctctcttcaaaagtccacagtgtttataagcacatcaggcaatgtcaaggcttagaaatcccagagtctcctggaataagacactcagatcccctcactctacctttactgctgccagcattccgtctggaaccaggcctggctgtggcagggcagagccagctctgggacctgcatggatttgtgtggccacaggcaaggccaggggaaggtgaagttattacctggtaaaaccagcagaagagaggaactttaggcaccttagcaacgagccaccctcccggcaatggttgttaggggtgtgggggatggtcactgagagctggctggttggcagaggatggagaacagaggctaggggccaactataccgggatgggtcgtgggacctctgtaagcctcagtttcttcatcataaaattcagagaccagaagttcatttaacgctttagcatgggactagcacatattagacatttaataaatggaagttcctaataataaaaataatgaagttaaggcaagtgtttagcatccaagaaggctgcttgagacactgtgaccttcagaggaaagacctccttccccagagggaggcctgtggagtgtgcagggccctgtcctagaaaatacctgggaaaccaagcagaggccagcagggcaggttcaggcaagatgagcgccacataggagctgagattcaggggccggggacactgaaacccccacgggggtcgctgtggtcagagaacccaggtctgcgaagtccccagtgactgtaaggatctgtagcccaggaagaggcagcctgggctcaaacacccacagtggcagtggagagtcaggctggagctactcacagtgcactcgagcagaatcacaaactcgcacagcttgaaaatggcaaatgcagcagtccccagctctttttcccggtagaaactgactttaggaacagcaaggaggcttctcacccagcacactggttcccaggcttcacccagctgggcagagggtcaggagcagcccatctctgcagaggcattggcctgttcctgccccaccccacctcgcagcaaacaaagatggcaagacggcctgggccgactctgggtgaggggctcacctgggtcaggaagcagacagctcctgtacggccaggggctctcaggttgctgtgtttggtacagtaacgtcctgtatttattttttatgtggttaccatctttgtcctcccaggaacacaagctcagtgagagcagggactttgtctgagcagtgccgcatctccccttggcacccagaacagggcctgctgcatagaaggaaggcgtcatgccaggaagcgcctgtgagcaggtggacagggcatcgcacacatgccatccgggacagacatagccccagacagatatattgggccgcccaaggcccaataaagtttccaaccttgattgacttcactgtccacctggccacctgttacctctgtagggagaaattctagtgtgcccgtctcctgcaggttcataagccaaatgcttttatctcatcacttcaagatctggggctggggatttctcatcactacttctgtctcctccttccctccttatggaaggacgtgagacctgtctgtggccctttggataagtatctgtcagcatttcggtcataataaaccctgactgtagttgaatttctttttcataataggaggaacaagagtgacattatctctgaatagtcattcgcacatgcacaggagagctgtcattggccctaatgactccttccataatcccacggtcatctggtaaatttgccgaaacgggcctcattttttgttctggtgtaatgtctctgcctaagcgtttaggtgctggggagacaggtgacaatgacatacatactcagaaatctcagaatgtttcttggttgctcgactgtccataataacaccctcacagtggcttttctctcttatttctcaaccagcatacaaaatctatatgagatgaatggtggaaaaggggcctttttgttcattcatctgtcagatccgttgaggtcctattatgggacctttaaaactaccacaggagaggaaaatactgccgcatacgtgacaactcaagtgggaccaaaggaagtgttttaccacaaatgtcattttcgaaaaatagaggtcaacgtatatataaatcacaaccgtcaaaccaaattaaattttatgagactcatatttccccgttctttccgaggaccattccctgctccgattccttcatcctaattctcttgttggatttttttagatttgcctgtgtgtttcatttttccagccattaggttttatatttctttccttcattcgcccattcacccagcagacacttattaagcacctactgttttatagattttattgttccaggtatcgtgctacagattagattactaaggtcaaaaccttttagtttctccctccgagaattcacaattttcaggaggagggatgtgagagggaggatggaaatgtactcggttttttcttttttttgttttgagatagggtctcgctctgtcacccaggctggagtgcagtggcacaatcttggctcactgcagcctcaacctcccaagctcaagcaattctcccacctcagcctcccgagtagctgggattacaggagcacaccacaatgcccttttttttttttttttttttttttttttggcagagatggggtctccctatgtggccctggctggtctcaaattcctgagctcaagcgatcctcctgccccagcctcccaaagtgctgggattacaggtgtgagctactgtgcccggccacaaatgtagtctaaattttggtacacatgagagtcgtgagaattgttgtaatgatctatggccaggggagtatgtgaaagcaaatgagtgagcagggtcagccaggaaggctctgcagaggaggtgagactcaggttggaccttgaaggggacacagtctttcgatgggagggaagacattccaggcacagagaagagaggaatgaaaggctcagggttagaaagttgcacagcacctgtcgttttaaagtatagatcttatttttattcgggaacggtgatgccaacagatcgagagacaaatggcattggaaagacagtttgttgctgacagatcccaaggggagggggcagggaatgccacacagggccatgtgcagaagcaccgggtgggtcaggaggcagaggaggaggggactgtggcaggagcctctgctgtggcttctgagggaagggccgggccaggcaaggttaggactgcctggtgtcacagtctcagcgggctccggggctgggggctgttcctgctgtcagatgcccagccccagtgacaggacagaggcatgaagccctgagtgtgagcgctcacagaggatgaggtgggactgggctctaggtacaaaaggtactacctccaggtgagctgcttgctgtctctgggaactggctcaccctgggagggccatctctccagggccagccaggcccaggtgtgccaggtccagtggaagtggtggctaatgcaccgtgggcagggccaagcaggcacagagtggggcgtgtgtgagcgggatgtgatgggagatggcccaaggggagccgcagctggtgggaaaggccatgcttgggggctggcttgtttttatctaaaagcacccctaagaaaccgtggctgctggtcaccgagctcgctggcatgtgccggagtgtccggggctgacctcgtcccactgggggctcttgacagccctttagggtgaccactgtggtcctcgctatgtggacaggaagtctcaggagctcagtgtctctcgaacgtaggcccagccaggcctcatgccccagagattttggccgaggagccactgctgctctcctcacgccccttcctgggcaacggagcagaagtcctcaccagcgtttcaggaatttagaaatattagcagggaatcacccaacatgtggcacagggagtgtcaacgtccctgtttccccttgagagggatcagatctgatgggagggagggacagatgcggatggggaggttgcaggactcagctcagacacggccctgggctcctagggcaggggccatggggggcagacatggcctccaggagaagggctttatgaaggagctggttccttcagggcatggggttgagcgggaaggctgtttcgggggacacacttgggagatgtgaacaaactggccagaatgcagagagcacagggggagctaaggcaggcaccaggcgctgtggactgagcgtgcccccaattcctgtgctgaaatcctcacccccaaggcgagggtgtcagcaggcctttaggaggggatggggtcatggggtggagccctcaccaatgcgatgagtgcccctctccttccaccacgtgaggacacaggggcatttggccatccccagcctggaagggagtcctcaccaggacccacccaggctgaccccctggtcccttcagtcccagcgctgtgaggaaatgaactcccattgcttgtaaaccacccagtctgtggagtgtcatcacagtcgcctagtggggaaggtggtgtaggagggcaccaggcacccctgggcctggagagggaggctggaccgctcggcacagcaagagccgtgaattggagtcgggtgagatggatgagctgggggcctgtgggttaacaaggaccccagactcatctgcccctccttccctgtggctgtgagccccaaggtccacaacaccctgaggcctgccccaggctgaaccctgcagggtgcgtgacgggggaagggaggcctatgcggaggtgcacacaggggtctcctttaggccagtgctctccgcactggttgccagagaggccgccttgcctgggccccgaaaaccaacagctgggcagccctgaccctttggtttgtttgttttaaggtagcaaggacacttgcatttttttttttttttttgagacggagtctcgctctgtcacccaggctggagtgcagtggtgcgatctcggcaagctccgcctcccgggttcacaccattctcctgcctcagcctcctgaatagctgggactacaggtgcccgccaccacaccacgcccggctaattttttgtgtttttagtagagacgggagtttcaccgtgttagccaggatggtctcgatctcctgacctcatgatccacccgccttggcctcccaaagtgctgggattacaggcgtgagccaccgcacccggcggaaaaatttgcattttttaaaactcaccgatctgtcaaaatagttcaagcaagaggttgggagcttctacatcagggtcctaccactgaaatcaagcaaatgtaagagaggctgtggaggagaccccaccatgtgcagcaggggaggggtgacagaaggagcactgaccctcgatgacagaggacgatggtgtcgtgaccagaaatagagccttccacaggcggagcccgtcttgggaggaagatcgcggttctggggtgaggctgtcacatgtgagctgctggaccccagaagcgtctgcctgtggtcggtaggaaggaggtcccgcacccaggtctctgtctccttgtggagggacaggaagggccctaggaaggaagccatgcaagagagaagaaagaggaggcaaggacacactcaggagggtcagagaaagggccagatggggagtggagggagatcgagagagccagcaccccaggaacccaagcatggagctcaggatcagggaacaaagcccatcactccacagcccttctgcctctgaagatccaaagaatattaaacaggaaagacaaaacaaacgacaacccggaaagacagaagtccccagggaagggctgggaatctagagctgggctgattcaaagcctgaagcttccttgggagtgaagataaacgcagcacagcgtcgagtcccctgccggcttatgaggtgtgcaaactctgcgatttgtttgagggaactggcctctgggccttcctggtttcctgtgcctttaccagaagcccccatctgtccctccctctgcaggggccctccagccacctcctctcaggaggtttcatttggctgtggtgggcacggggaggagccgtcagaagcaggggtactcagtgtctgtggaagttgctagacgtgcaagttttcctgctgacaccagagtttcagccaggcagggtgcgcttggcttggcagctttccatggaaggggttctggagcatctttttctcctcctcttagctctggatggaggggggccacctcctcacgtccctcctcccttccccacacgcagctgcaccttgtctgcttcctctccatgtgcagaattacctttgggatgaggttaatgactctcctctgagcagccattgaccctggcctccggagtgctgagctcaccatggccaccagagcctcccagcaggggtgttcctggtcctgccctgcccaccagtttccaccagtttttccagaggccggatctcatgtgcacaaacagaccaagcctcctggcccactggcgccaaaccccggccagacctgggagtgggcaagctggggctgcgtggcgggcggcagcatccccgtgggtataacagacagacagctcccctaatgggcctgaaggaccgcccctaccgggtggcatttgaaatagatgccatttctgcctttgtccgaaatatcataaagtactgtttattagccttaaaaaaagttaaaaaaaaaaaaaaaaaaaaaagccgttcaaaatcccggcttccccacagagcttttttttttggagacagagtctcactctgtcacccaggctggagtgtagtggtgcgatctcggctcactgcaagctccgcctgccgggctcacgccattctcctgcctcagcctccagagtagctgggactacaggcgcccgccaccacgtccagagaattttttgtatttttagtggagactgggtttcaccatgttagccaggatggtctcaatctcctgaccttgtgatccaccttcttcggcctcccaaagtgctgggattacaggcgtgagccaccgcgcccggccccccacagagctttgatttgttttatctttaaagaattctgcctccctctacatcagcacattgttagtgagcacccagttgcttctagaacattctttcttggccttgaaatctaactagagagccagaggagcccagccagggttaaagaactcctgtctctcacgaaaaaagagtcctggtctctccagacaaaaatgtaaaccttttattatagaaatttcagtttctcccctagaggtcgctaagtgtagttacatttttggtgatcatctgttttggagctccgtgtaaagcaacccattttcagtactgatttttaaatcattcgcatgttcatttgtaaattcgttaatgcattaaacaccaagttgaggctggaccctgggagagatgctggaggtgcagggatgcgtgagaccctgaccttgcctcagggcaagtccacaagcagccagaagtgatgacacatgtggtgagaggactcagcagccgaggaggagtcagtgccgtgggggtggtgcgctccagcagggcttgccacactttctgtaaaggtcccgatagtgaatacttgaggctttccaggtcagacgctctcagttccagctccgcagttcggctgcaaaagcatgaaagtggccagcagccgcacaaaccagtgacagtggctgtgttccaataaaactttatttacaaaaacaggaagtgggccagattcggcccctgggccggagtttgctgactgcagtactagagccctgcttgtttgtgtttgagacggggtctccctctgtggcccatgctggagtgcagttgcataatcaccactcactgcagcctagaccctcagagctcaagcgatcctcctgcctcagcctccagagtagctgggactacaggcatgcaccaccacacctagctagattttgtatgttttatagagaatggggtctcaccacgttgcccaggctggtctcgaagtcctggactcaagcaaacctcccgctttggcctcctacagtgctgggattataggcgtgagccactgaacctggcctagagcctgctttaataaacctgctaggggccatcacgttaaagaaggtaattgtgtttgacttactgtttgttgatttggcccagactctgtgaagttggatgctacctcatagaagattgtaagttgcaaagccagaggtcacggttatattgctctcatagctggttttatttctaactttttgatcttattgagcattctttctttcattcactctacatactttgacatatattcccctccgaaccagttttaccatcttactagttcctcattaatgagtgaaataaatctttgacacacactatatatttgtatgagaatttgtatgcatgtatgtatttatttatttatttttgaggcagggtctcactctgtcatccaggctggagtgcagtggtgtgatcatagctactgcagccttgacatcctgggcgctaatgatccccctgcatcagcctcctgagtagctggaactatgggctgtgccaccatgcctggctaattttttttttaattattttgtagagatggggtctccctctgttgcccaggctgattttgaactcctgggctcaagagatcctcctgccatgtctcccaggagctgtgtttttatttatttatttattcttttgagatgaagtcgcactctgtcaccctggctggtgtggagaggcacaatctcagctcacagcaacctccacctcccaagttcaagcaattctcctgcctcagcctcccaagtagctgggattacaggcatgtgccaccatgcccagctaatttttgtatttttagcagagacggggtttcaccatgttagccaggctgatcttgaactcctgacctccggtgatccacttgccttggtctcccaaagtgctgggattacaggtgtgagccaccgcgcctggccaggagttatattttttgttttttgtttgttcgtttgtttgttttagatggaccttcactctgtcgccaggctggagtgcagtggcatgatctcagctcactgcatcctccacccccctggttcaagcgattctcctgcctcagcctcgtgagtagctgggactacaggcacgtgccaccacacccagccaatttttgtatttttagtagagatggggtttcaccatgttggccaggctggtcttgatctcttgacctcgtgatccacccacctcagcctcccaaagtgctgggattacaggcgtgagccaccacgcctggcctgggagttgtgtttttaaatgaatgctttgacagtgatctgcactgtgctgggggtactctgaagagggtataggagtacagaattaggacatagattctggcagcctggcaggggcagtgagaggctaagagggatgctgttcagaggcttccgaaaggcccggatgctctccagattccaaaggagtcagccagttgcagagaggaggggtggaaggagcagacacactctgagagggggaagagtggtgcagggggacaggtgttggagactgcgtgatgcctccaggtaatgacaaaccgcggctgcaggaggaagtgcaggcagagcctaatggagccatgtggcacctgcctgggttccccaatcatttggcacctgttccaatcgacatctttcaaaaagggagaccaggcactgggcgggaagggcagggtagtttgaccttggctgccaccttcagtggtccacccttttcccaatccattgatcctggccctgaaactgttttatgctcagcaaaacaacagccctgtagataaccagacactcgctgctcagaaggcaggtgagggggtcatctcatggagaatggccacagggcctagcaatggctccctcctcaggctctcctggtgggaaaggatgaagtgaagtggagatcagccgccccactgtcccccgtttcttttttttctttcttttttttttttttgagacggagcctcattctgtcacccagcctggagtgcagtggcatgatctcagctcactgtaagctctgcctcctgggttcatgccattctcctgcctcagcctcccaagtagctgggtctacaggcacccaccaccacgccttttttgtatttttaggaaagacagggtttcaccatgttggccaggatggtctcaatctcctgaccttgtgatccacccacctcgacctcccaaagtgctgggattacaggcgtgagccaccgcgcccggccagcccccgtttgtgaccgtgcagtggtttcccagcatctctgcagagggagccgcacgcccggcgttctcagagaaacccgatgagcctggctgcctcttgctgtgctttcccccactctcctgctctctcaacgcggcgcgtgcctttctctcccgggcagcctcccgggccttactggttctctttcgttcctcttggtcgtgggggtggaacagccctgaatcccagagctactgccctgaccaccgctgaccccgcagcagcccctgtggctgagagcctgccctgagtgcccagtgcctgaacaagatgagggagcccacagggtcaggaagcccccaggcctcaggtgaatgcttctggggccaggaaagcagccagacagactgaatccatacatgccgagcatccaggccagaggagggcagggagctctaggcagagcccccgcccaggaccccagcgttcctcagtcttgtttatttctccctcaggcagccgaatacacacatccagggtggggagggtggggagggtggggagggtggggagggtggggagggtggggctgcaggggccaaccagaggaaggagacctggagtcgcttagcaaaggtgaatgagcgtccgcagtgcagcttggggtcttgagagtaagttgaacccgccaggcgtctgtttccccctcacacatgcacagaccaggcaaggacccggaaggcaggaggctgccgggaaaagcgcccaccggtcacttggcaccgtgagctacgcacgtgagccacgtgcgccctgactgctggctctttccttagtgcttatacgtgattgataaaaggtgctaaattgacggcctgaaatggaagtcatccctttttcttcctttcttcttcttttttttttaaacaaacaaaacgtattctccatgaaatcgcccagtgctttggtttaacacccagaggactggtttcactaagaggagcccacctaagtcaccgaggactctgaaaccgctaaaccatgccacagggccagcattcaacacggaggcactttgcacccagtaaaatccaactgaaaaaatgtggggcttggtcctccgcactccccagtatctggtcccagcccgcctacgacccccatctcctcccctgagacattgcccaggcagccgggggcctcccacggaagcctgagcagctcgtcttgcttgcccttccctctgtgctgtggtgcgtgttctccattacctggaggcctgtaaggtgtcgtgagctgtgccgatgtgtgacaaacatttggtgaccttgaatgaatcactctttttctgggcctcagcttctttcagcgtaacataggctggaataatatcctccggcttcctagcttatgggtgggcccatttatgcatcagctgcatagataaatatcgcacggctcctctccactagacactgtgccggggccagagctttcaagccaacctgagtgagctcctctgagatccccggatcgtgaagttcattctctttttgcccatcaggattggatggttccagtctcagcattgtgctcctgggtcctttccctcttcacagacgcgatggaggaaggcagctgccatgggccctgatgggggatagggaggcctcagtcctgtctgactcaagagctagtccaaccccaggttcgcctagacccttcccttctccaagatgagtgttctgtggaaccttaatctatccacataactcttgttttctgtgtctctgaagtgaggatttgagggtttcgatggctaccccagtgctgagaactggctcactttggctgaagtgaggatatgagggttttgatgtctaccccagtgctgagaactggctcactttggtgccaggggacttgccccctttgcctctggctgtgcaagctgcacagtcttttcctaattacaccaccctgtggttttgccgacttccggggtattcattatctacgctgacctccagctcgttctctaccaaatattttggccggtcattctacatttcattttattgtttctttttttcgttgaggtgaaattcacctcacataaaattaaccattttaaagaataccattcacaacttagtagattcccagtgctgtgcaaccaccacatctgtctagttccaaaacatttttatcatgccacaaagagacctcatacccaatagcagtcacttcccatcccctcctctccccatcccctggcaaccaccaacctgcgttctgtctcaatggatggaaagatcctggacatttcgtaaactggaatcgtgcggtgcatggaccttgggtcaggcttgcttagctttccatcagtcatgttttgagatttgtccatgtggtagcaggtgtgggtgctttgttcctttctatggctgaatcctgttccatggtgcagagtccttttgtttatccactcagtgctgggcgtttgccttgttcacggctttgactgtcgtgactagtgcactaggagcatgtgcctgcaggtatctgttaagacacctgttgtctgttctcttgggtcagtggctgggggcggagttgctggcttatgcggtgactgtgtgtagcttttggaggagccactgaccatgtggatgttttcagctgaaagcgttgagagttttgcgctttgcctttcgagttctctaggaagcaagccaccagcatgcctgcttacacagtctcctctgcatccgtgtcgccagtttaccaaggtcattttgaattctcctgccaccctcccaagacttagccacccaccaccttggtttcctctgcacacttagtgagcacgtttcctatcctgtcatttaagccacttacgaagtgttaaatgcaccaggccccaggccaatcccactccagcagccagtttgtcctgacatgctctccatgcttgcagccggccttctctgtgtcccttgggtcccccagagccacacggccacacgaaaccagagtttgcttgtgatggggctgcagagatctccaaagatgagctccagggctctcctggtgggcacaaggccgtggctgtctctcccgtggctccctagctggcgcagcttgtgtggcaccatcaagggggagagagggacgtggtcagcttggggcagtggcagtagaagcggcactggcactcgggtttcttaagagcacaaggatgagtgagaggtggggctcggggtcagattaggggaaatgaaaatgctactgagcagggagatggtgtggagctcccagacagggagtaaaattagcacgagacagaccatggggcaggagcaaagactcgggagaggaagaagctggggaacttggagggcaccctgcaggcatcgccagcagacccggaaaaggcaagtctctgttgaagggagtggctcttccctcgtcaacactgccaggaggcagtttctttaaatcttaaggggactgggcctgccgatctggcttccagggcagaagactcatccttccctgcctaaggaccttccttatgccgtgggccagcaatggtgtctgtttggtgtgtgtttggggcagaaagggttggggtcgaagctggacccccagcctgtgcccacagctctgtcactgcttaccatggtcctggccaagtcttcctctctaggctttctctgagccctcacttgtcaaacaggaggaaggatgagatggtatggaaggtcccctccatcactgatggcctccaagccctcagaggtttgttcccaggggtttcactgtttgggtccagtccttctgtggcccagttcttgactgtgagcttttgactaaaactcacccagacttgatggtgggcatagcaagagcctgtatctccaaggcacaagagggggttgtgcaggactcaacttgtcccaggtgtggggacgccttgcagccctgcccagctcaccaggtaccagcaggtgcacatggtctacatggcagcctcagtccctaaggcatgtccagcccatctcagtgtctccctctgcacaggtgggagctatcggcgacgaggaggagtgggtcaccctctatgaagaggagaatgagcctgatgcccagatgctggagatcccaaacctcacaccctacactcactacaggtgagaacagcagtgataagctgttacaggaggaaacactggcagcccaggcaggtgccttctgttggcaatagtaaaacccagtcgtacgtatgcaaatcagatgtttcctagtggcaataacagtacctaaaagccttaaggagcaggcgggatgcatagcttggtgttattccaagggagatgataggcagatgttagactcatgaggctccttctatcagtaccagctggcaaaacaccccatagaaatggcccactgttattatattaggctgaataaccaagaaccacaggcagcagagatgtggcactttaccaaactccacaacctgttgggactattaacgtgccgtgtgcaaacaaagcagatgtcctaggaagatccttctgctccccttcccaagcagggcccaggagctgctagtctcacttatcaagcaattaacatgccatttaacctttagcttcttgaaccccgaaactgatccgggcagtaaatccttggctttaacaaagggtagggtgattatgagctgttagtactgtgatcacttcccgtaaggcctttgaaggagatggaatttccagttatcaccagatgttgagtttgataatgtcattgttctgccaggatggaacatttcatacgattggagaatgaaagaataggaattagtaattcagggactaaaaggtgaaattacatctttatgaagaatttttctttccggcacaaaaccaaagttagagttaaaaaaaaaaaacaatgagagatgctatttagcttctattcattttaacatccttcaggagcttagaacagacaaatcaggacacaatacactgggttttaaagaaaaacatttagcttaaaatgagctgttgggattcaagacttaccatgtgaaattaactgaagctatatagttatttcaaagaacagaaactgtaagtagagatcagtgtccctgtctgaaactcaggtacatttggggaaacctctatagtaaatgtatatgtgcatacttgggatatttttctagtatgtaaattgaattcaaataattgtttatgtatgtgtaaagaagagacagaactgaaagcattcctgtagattttagagaacattgaactccaccttcattttatagttaaggaaacggagatcatctgatttgctgtaagtctcacagttactcactggatggaatcacagagtgtggtgtgagcggatagaggcctcagttacctgacaaagtttattctgccaaggttgaggatgcacccgtgacccagcatcaggagatcctggcaacatgtgcccaaggtggtcagggcacagcttgcttttatacattttagggagacatgagacatcaatcaatatatgcaaggtgaacattggttcagtctggaaaggcaggaaagcttgaagcaaaggcaggaagactccaagcagggagggggcttgcaggtcacagataggtgagagacaaagggtcccattcttctgagtttctgatgagcctttccaaaggaggccatcagatctgcattgatctcagtgagcagagggatgactttgaagagaatgagaagcaggtttgccctaacgcagcttgcgttttccttgtagcttagtgatttggggttcaagatattttcctttcacccctcattcttctcctgaaccaacagaagaagagatgcagagtgccgttgatcatttaaaaggctggacttcaaaactgccctttggtagtgacatcctgatattccaattctgtcccatagctacttgcactttaacccctcgaggttatcctaaacttgaatcagggcaactgatgacatcaatttctggacacccaatccatccaactagatttcacttgcaaatttaaaattgttgagttgcaactgatgtacctgtacctttctttgaagtcttttaggggaaaaagggcacatatgcaatttgcattttttttttttctgaggcagagtctcgctctgtcacctaggctggagtgcagtgacaccatctcagctcatgcaacctctgcttccctggttcaagccattctcctgcatcagcctcttgagtagctgggattccaggcacccgccaccacgcctggctaatttttgtatttttagtagagacgagatttcgccatgttggccaggctgatctggaactcttcacctcaggtgatcccccgctgcctcctgcctcagcctccctaagtgctgggatttgatcccccgccaccgcctgccttggcctcccttagtgctaggattacaggtgtgagccaccacacctggccacaatttgcacttttaatgaaaccaggtgaaaagagggtgtccttgagcaatagcctttatgatatgagtagacacctatctgagccctcccttgagaaacagtcagcgcctttgtggtttcgttcttttccttcttacctttgctttgccgtgactctcatcagtggtttttcctttagatttcgaatgaagcaagtgaacattgttgggccgagcccctacagtccgtcttcccgggtcatccagaccctgcaggccccacccgacgtggctccaaccagcgtcacggtccgtactgccagtgagaccagcctgcggcttcgctgggtggtgagtgggggtgagaagggaggctggaggcacacgggtcctgagtgagccagggcacacactaatccagggcttaggagtttcttagtcacgcctttgtcctagtcaaaactaatctcatcgtcaaaccaaaaagtattgcattttacaattagtgttggatctcaggccagcccaggagatctgattaattagtagcattactcactctcttcttggaactgaggaatattccttggggcaggaaagctgggggtgcctcacaccagaactctaagtccttaagctaggtcaacatggaaccaatactcaatatttgtaagagagccagcctgatatttaatcagaacatttgcccacaaaattaagccaaaatgtattaaaagaaattatatgcagccaaagttactgacagggtttcatttaattcacagaacaaaagtttcagggaagaataaagtagatccttctaagactatttcccccaggaacacctcctccacggagttggcctcacagggcaggcccatcccttacaacccgtgagggtggcagttctgagatgtcagctcatcgcgactcctcgttccttcctagcccctgccggattctcagtacaacgggaaccccgagtccgtgggctacaggattaagtactggcgctcagacctccagtcctcagcagtggcccaagtcgtcagtgaccggctggagagagaattcaccatcgaggagctggaggagtggatggaatacgagctgcagatgcaggccttcaacgccgtcggggctgggccgtggagcgaggtggtgcggggccggacgcgggagtcaggtgaggggaaggcgattcccatcctggagacaccgcattagagatggggctgagtgcccctgagcctccagatcccaggctagtggcgtctcattggcctgtcccacttgtgtctgtcttggagctttcctaatcccgggtttggccagactcggcaggaatttctgtctgatttcattagggccccaagccattcattggaaactggtgatgatttccaacaggggatcgactcacattactgttttctaaattagggataattttcgctaacgatgaaaagcaagaatgtgtaaagttcctatggggaatctttaaaatacaaggtattcaggaccttcttgtcacaaattaatagacgtagtatgttaagtaatctagcctgtggtaataaataggcctctaaaagtttaattgcttgaacataataggagtttacttctcactcatattgtggtctaaggtgggcgttcctgtttggcgggtggctctcttccacaaggtgattcagggacccaggctttaccgttctgtgggactaatctccttctgcacccagctgccagcagggaaaagaaggcaaagaatggacctcttcagacctgttcaggagtggaacgtcactctgttcatcttcttggggctcagtcatggggctctgccagttgccaggaagcaatggagcagtgtttttggccaaccttgagcagacctctgctgccctgtgctaatgctgaaagtggctgcctaatcttctgggctttgtggactaacttccgctggccaactgtgggtcataggagcttttcttgcccccctccttaaatttttagaaacccaaaggaaggacggcaattaacgctcatgaaggactcactgtcacctgaccccggtcccttcagtctgatctgaattagtgaggttctgtctggagaaggaatgaaccagctgcacctctgccccaggcttcttggatgagagtcacagcttgtgcttgacagatggaggggctgttcattctggactaacctaggctgttagaaatacaacttaaattcctgacctttgtccagacatgggatgaggaggaggtatgaagggttgagatggtgaactgggtcagtggccagaggaaaagaacaagactcccccactccttcccccagggagcctagatccattttgcttattgatgtcaaaccctcttattcgctctcttttgcttctcttctctgactctctgcgttaatgagaatatttggctccattgtttttgctgtcgtagacatggctctgtttcctggagacagctcctgagcccagcatgagtcctcctttccttggggctcccagggcacagaatcgctcttgaagctggggagtcaagagatggccagggcctgcccacagctgtttccaccccagagtcctcggaaatgccccggatctgccctctctgcaacccagagcctccctgcttctgtccctgtactacaatgccgtgcaaagagacagtccccctgttgttgttttcagtagaaaaattaattaacttgctagatgctggaaactgccttaggagacacagttggaactcagagtgactttgatgggaaatggacagaaagatgagctaggaagccaagtgcgtgacgggtatcagagaaaacctcgcacagtcagcaggaggaggcggatgacgtgggggcacaaggcctgttggcatgggtggaggtggctttggggggctgccatcctcaggacagaggagtttaaaagggaggaaagcatagacacttggggggcccagggctcccgggcctggcctgtctgctctaaagatgaagagggaaacatagaaggtggtgccgaggtgggagggcagcctctgaggacagctggagtgaggacgcagatcagctcccagcaataaggaaaggggacttggagccctgggcggtgccaccccctcacctcttcctaatgctcatcttatccgtgccaggtgctgcaatgggtgcaggtattcccaacaccacccctccaccctcgagacagccaggccggggtgaggagtctgcaccctgggcttgggtccagcagcgcccagcacaccgagggcaccagcacgtgcccagtgcatctgcacgtgccacccgctctgtgtgccacagcgtggaagggcctgggaagctctggataaaggctcctctcatcctttcttgctcattccccgggtcccgttggtgacaggtctgaacctgccgccacccttgtaggttactgtaatgcacagtgggttgcaatgcacagaagccccctgggtttcctcaatgctggttaactttcagccaccagcaccaagccaaagctcctgtgccactttgtggctttatttcttcctactcttctcagagggcaggaggtgagggtagacaggaggactcttaagcagtagcagggagaagcagaaccatggccttgtgggaatgctgttagggcgtggcgtgaaccctggagcccaccaatgagagccccggaagagcagccgtggtgacaaccagtgtgcttctgagaggaccagtgtttcaggatggaactgcccaagcagcagggctgggcccagtgtccctcggctctccttcagactgaagctttcattacgttccaaaggaaaggtggagacgcacccacatgcagcctgggattgtggtcacgtggatttcaaaaatctctgttatcttcactgtctgaatctttgtgacaaaggagagaacttgagaagttcagagggacagttctaaatccagtaaaaggcaggccaagaaaatagtttttcagaattaaaacttctgccataaccaacaaaaacttatggataaaatataactttctggaatcttaaatgtattggccaggcagggtcctcacacctgtaatcccagcactttgggaagctgagtctggaggatagcttgagtccaggagttcaagaccagcctaggcaacatagtgagaccccatctctacaaaaaatacaaaaattagccaggtgtggtggcatgcacctgtagccccagctccttgggaggctgaggcaggaagatggcttgggcctgggagtttgaggctgcactgagctatgatcgcaccactgcattccagcctggccaacggagcaggttattatgcctctaaaaaataagtaaataaatgaattcatcaacacactcataagaaaaacagggaaatcctcaggtgtcagaggcataacaggaactagaaagagttcagcaggaagtgctgggctggtgccgcagctgccctgggtgggataggatcaggttggatctttcctggtggtttcaggacctggggtaaggagtctgcaccctggtcctgggcccagcagtgcccagcacactgtgggcaccagcacgcatccagtgtgtctgcaggtgccaccgggaactgtagatacactgggcaggccatgcagtaacatgagagtcagctttgaatctgtgtaagggaagagttagggcctaaactcctgcagttgagacacggctcttgaaggcctttccctccttcctaggagaggctgaaactctgcctgcagaggtttgactgtatgtctacctggactctgagtagagaatgaaaagtcagtctgagccctgtgcccagctcaggactgggttttgaatttgcattatatggatggcccaggaactcccagaacagaaattaatgtaacatttggttccagaaaccaaaagcacgagcaactaaagaaaaagtagatacattagacctcatcagaatgaaaacctttatgcttcaaagaatgtcataaaggaaatgaaaaaaactccccaaatggaagaaaatatttgcaaattatgtatctcatgagggatttatatctagaatatataaagacttcacaacaaaaagacaaatgacccagttaaaaactgggcaaaggatcggcatagacattcctcccaaggagatttacaaatggccaccaagcacatgaaaacatgctcaacatcattaactgttagggaaatgcaaatctaagctgcaatgagataccacttcacactcctaaaataagatggctaaaataagaaaagttggacaataacaggtattggtgggcatagagaaattggaatgcttgtacgttgctggtgggaatattaaatgattcagaaacgttggaaaacagttggcattcctcaggaggttgagcagggagtcaccatacgacaaagcaactctactcctaggtatgtacccaagagagcagaaaacatatgtctacacaaaatcttgcacataaatgttcatagcagctttatccatagtagccgaaaagtggaaacaaccaaaatatcactcagttgacaaatggataaataaaatgtggtctatgcattcaatggatgattcagcaataaaaaggaatggaattctgatacatgctacagtgtgggtgaaccttgaaaacattaggctaagtgaaagagaccaggcacaagagaccacatattgtgtgattctatttgtaggaaacatctagaataggcaaatctagagaggcagaaagtaaattcatggtttcctagactaagagagagcatttgagaggaatgggaagtgatgggtgatggaaacagagcttcttttggggatgatgagatgttccaaagttcatcatgatgatggttacacaactctgaattcactaaaaaatgttgaattgtacaatttaggggaattgtatgatatattaataatctcacaataaggctttaaaaaaaaagctcagccttcctgagattaattttatacagataaaatgttattaaaataagtatgggctgggggctgtgattcgtacctgtaatcccaacactttgagaggcagaggcaggaggattaccaggagcttaagaccagcctgggcaacatagcaagaccccatctctacaaaataaaaataaaaactatagaaaattagccaggcatggtagcacatgcctgtagtcccagctacttgggaggctgaggcaggagaactgcttcagcccaggaggtcgagcctgccatgaactacgatcatacccctgcactgcagcctgggtggcagagcaagaccctgtctctaaaaaaaataataagaatggctcatagattgtacactttgcgtatggttggaaggcccagaaaatctgtgtgtaatatcttcttaccctcagggaaaacagtgatcaactcttcctgaaatagttacatatcataccccaataaaggattttactctcctccaaaaataaaacaaaaagaaaatacacaaaaaactaaagaaacatggtttcaggccagaccatctgggcaatcaacagaagcaaaaatgattcctctctggagagatattgccaaagccaaattatccaaaataaaaagcctttttaaagatgaatcacaattgtcaagcacacaggcaatgatttgccatgagtaaaaatgaccagttttaaaaaaagagagaaagatagagggcttcaattacattaacatacatacaagtctgagagaaatatataataactacatttaaaattattaaagtcttagtaaaataaagcgttaacattttaagtaaagattaaggtaccatttcttaaagcagatttgtttttagaaaaaataaatgggacacagtcattgaaaatgaaagcagtttagacactgtcaaaaagagaattaccaaattaaaagctagatttgagtaaataactcttaaaacaacataaagacataagattgaaaatagagattaaaagacttgaagaacagaatgagatctaccacatagctaataggactcgaaagaggaagcaaatgagagttacaaaatacacagagataatagccgagaaattccagggttgatggaaagcattatttacaagactgaagaaacaccaatcccgagtggagtaaataaaactgaattcataccaagatgtatttgctacaactgtaaaatgccaaagagaaaaatcttaaaaacaattggagtgaaaggcaaataatcacaaaggcaagaccatttgactgaggtgactattcaggaacaacagaggccagaagacaatgggataataatctcgaaggagctaaaagcaaataactgccaacctcaaattttatacccagataaactaatcttccaggattttattcagaaaacagcaaagtaaatgctatataaaaatgaagacaatttaatcaaaatagatatattgttttgataatttttcaaataatactcttttttttgaggtggagtctcactctgtcacctgggctggagtgcagtggcatgatcttggctcactgcaacctctgcctcctgggtgcaagcgattctcctgccttagcctcccaagtagctgggattacaggtgcccaccaccatgaccagctaattttgtatttttagtagagatggggtttcaccatgttggccaggctggtcttgaactcctgacctcaagttatctgcccaacttggtttcccaaggtgctgggattacaggcataagccaccacacccggccaagaacactcttttaaaaaaaaaaaaaaagaaagaaacctatggcaaaactgctgatttgagactcttttttttttaaacaaacatttccagctgttgaaaacctatctttatagtagtcaagagaatgcagaggataatattttatgtgtaaatgtattccagggtttttcttctgactttgttttttttcagacaatcttgtatcatcttttacacaagaaccctgaggagactttctctagcgatgttgtttatttttgtagatgctactgtgttttaattaatattgagatatagattttgtatcaaaagaagcaagtggatttacctttgtcctagctgattgtagcatgtatggtgatacggtttggctccctgtccccacccaaatctcatctcaaattgtaatctccacatgtcaagggagggacctggtgggaggtgattggatcatgggggcaatttccgccatgctgttctcatgatagtgagtgagttctcacaagatctgatggttttataaggggctcttcctcctttactctctcttttctctcctgctggcatgtgaggaagttccttgcttccccttcaccttccatcacgattgtaatcctgaggcctctccagccatgtgtaactctgagtcaattaaacctctttcctttataaactacccagtattgggtatttatttatcacagtgtgaaaatggactgatacatatggctagaggggaatcacatagagcccttgcagaatcccctgtatcagcctcactgtttttctgttcatagttcatgttctgttcacttgttcagaggattttgatcaagagtaggaattgttcttgcaactgaagctttgttttgtcagttattacattctttcttattttgagggttatagcttatggaagggtattttttagtttctaattgaatgtgtgtttaattagaaactggtgcaacacatattgctctgggaaaaaaagttttggttcacgtgtttccatcaaaaattttataattgggttattgatcttcatttcaagatgtggatgattcagattctggacatgttgaatgctggaataacgagctcccagggacccctcttagaccagtctctcttctggttggtgctggtgctccatctctgcccgtcctaccacctggggaatctcaggggcccagatgctgcaggacttccgctccccctccttgtgtttagctcatcagaatggagatttcacagccttcttctctgggaatctccccacctctgactggcaaggccctcccaggtgcagcagttttgactttgggccttccctggccctactaacatctgaaacttactctccccagcagaaaactcgatccttttttgaaatggggggaggcagggatgagatggggaggtgaaggggttgccagggctgaatggtgagtggacctgatggagagggagaaggattggagagagaataaaacaactgccttttgtctgaaataagtctcccctcaatggaaatagcagctcctgggagcttaggaatggcccagtgtgcaggagtgctgaaaacacgcagagaacacacagcagaatgctcggagccacatttcaatgaagtttacagttttgaagtgcagtttaacaggttctgtgacatcttatgatatattatgatatattctaaggataaatgaggccttaaaaaccgagagagaccacatgaggaggaacagtgagctgcatagtgtgaaatcctacagaggggagagaaaaaaatgaaggagaaaagaagccatggaatggctttgtttttaatgaaaggggaattcccaagaacatctcaaaacgtaagatgtcaggttggaaagggagttgaatctacttcaaaatagatgatgggtaagaggtttctttttcaattcttgaaaactttgcaactccatggcagatcttgtcctcgtaggatttaaatgcgctgaaatttccatcctgaactctgccattttctttgctttagctgcctcacctccctatctccacgtgagaagttcagctgcgttcaaagccccgttggtgtccgaattgctgcaatccccaggttgccctctttctccagggacggggttggctctccagtaaatacctgctcatcccaccacatcttagaaaaacagctgtgatttgtaggtctatagggagaattgggcactcacagtttcccacaggaagcagttaaagattacagaagtagaccatttgtgttgctatgacaatggcctctctttttgcagacagggacagaggttttagaacctggtaccaacgtcttgggcatacagtgtttggtgttcttaccttattctaaatatattcggatacgttgtaggtttacattttttttttaatgttagtgccccctttagctcatagttgattcaaggtcccagtttatcaaacttttgtataaaatgagcaatgtgcaagccatttcctggtaacagccatggtggcatttaagacaccctatgggagctctgtgcaggcccagggagcaggagtgagccgggtggagccacagctggaaggcaccagggacttggggctgcatctgtgacaagcccccttcctctttggagaactgagcaaacttcacattgcaagtattccctttccgtgacacctctctactcaaataaatggatagtatttcatagaagcactgagtaactgaatgaatgactctcaactgacatatttgggaagattggactggctggcattatctccctccaaaaatagaagggggctcacagtgtttttatagtgacaggcatcactgggggttttctattttgtggacacattcactgacctacacccagcagccgatctaatgtccatgcagggaaggtgctcagcatggtagggggagaagggaagggagagatgctgcctcccagggctctcaggatcagggagcgtgccccttcctgggggcaggcatcccaggcctttgctctgcaggttcctctgtggtttcagagaccccacagggtgtggtgagggttgcggtgaggccactgactcgcgtcctgaggcttagtcatcctcagccgctggccctgttaggctatggcctgctttggggctgtcctttctcgcccctcccttgtctagggaaacacctgtttgtggtggtgaggcgagaagcttcccacacagcatgagaacagctcttctaggatgcacatgaaccctggcattgtcttaaagactgtgttcgtgtcatagcagaatgccccaaacggggtggcttaaatgacagaaatgttttctgttaccattctggaaggtggaatctgagctggaggtgttggcagggccatgatccccctgaaagcttgggaaggatctgtcctgggcccctctccagcatctggtggttccgtggctcggacagcctctctcccatgtccccacagagttctccctgtgtgtgtctgtctcctcccatggcactctccctgttgtgtgtctgtggacaaattcctttttttatatgggcactagtcatactggatcaggggcccaccctatgcagtatgaccgcatcttaacgagttacatctgcaacaactgtgtctccaaataaggtcaccttctgagataccggaggttaggataacaaaataaggattcagggggcacaggttcaagccataacaaagatcaaactactctcgtgtagaaaatcttgcaattaaatgtcataggttgcattattgtgcaagccccccaccatgttactttctgtcttcagactaactaacagtgctaccctctcagtctctgtgtaatgaggaagtctgaatgtctgaaggaatagatgagtgaatggatggatggataggtgatgggcgaatggatggatgggtggatggtagatgaatggatgggtggatggatggatggatggatggatgggtgggtagatggatggatagatggatggatggatgggtgatgggtggatgattggatgtatggatggatgatagatggatgagtgaatggatggatgggtaaatggatggatgaatgaatagatggatggatggatgggtaatgggtggatggatggatggatggatgatggatggatgagtgaatggatggatgggtgaatggatggatggaaagatggaatgatcgatttatggatggatggatgggtggatggatggatggatgggtgatggatggatggatggatggatgggtagatggatagatggatgatggatggaggaatgaatggatggatgggtgatggatggatggatatgtagatggatagatggatggaggaatgaatcgatggatgggtgaatggatggatgaatgaatagatggatggatggatggatggatgaatggatgggtgatgggtgggtggatggatggatagatggatggatgatggatggatggatgagtgaatggatgaatgggtgaatggatgaatggatggatggatcactggatggattgattgatggatggatggatggatggatggagatggatggatggttggatggatagatgagtgggtctatgaaagagcagaggaagtcctcgcaagtgttcctgctacagaggtgcatgtgtgcatcctgctgttcttggagccctagtagggcttgtgaaggagaaggaaacagatgcttctactcacctctgtgtgccagtgccctaccaggcacctcagtgtttgctttcattctcactctaaaggctaggactggtcatagcatcctcctttcactttcttcaaaacaactagctattgatcacctgctgaccaacaagtgctgaccaccaggaggggagagtgagaagactcttaagtaaggaaggtaggccaggcttagcctttcacaagtgggacaactgaggcacaggtgatcagagcagcatctccagctcccaccctgagtccggccttactccatcactccaggctatttccctgggtatcctggagaccacctgattcaaaaggagactttgccaccaaacagtatcctcccagaacctccgttgcttcatctgcagagtgaacccccgaatgggatatggtggacttgaagtgtctctcctcctttttcaaccatgggggccctgaagtatggcgggatcttcagtcccagctgagagcagctcctccatgctgtttataaacagggccttccctgactgctaggggctagctcaggtccaggttttcctatctgaatggtgtttgaagtttaaatcggtccacaagaaaattaacaaagcaaatggagattgtctagaatataatacccttgtttttaaagtttcactgcttttatacatattatatctgaatcagtgcaaacatatcaagacaaattagttcagtgatgttgtacacagaagagagatttcatgaaagtaagaaaatgatcttacatgtgggccgggagtggtggctcacgcctgtaatcccagcacttgggaggccgaggcggacaaatcacttgaggtcaggcattcgagaccagcctggccaacatggtaaaaccccatctctagtaaaaattcaaaaatcagccaggcgtggtggcacatgcctgtaatcccagctacttgggaggctgagacaggagaatggcttgaacccaggaggcgaagttgcagtgagccaagatcgcaccactgctctccagtctgaaataaagaaaagaaaattttcttacatgtgtatgggtcgagaatggcatggctggcctcggctgcccatctccttttagaaaaacattcattgaaatggatgaatgcgattttctcagctttagttttctgatcggtagaaaaggggtaacgatacctacttcattgggatcattgtgggattagatgcaattatgtaactgaaggcagttggcacagacaggcactggataagcacctagtcaacctaccctcccttccccttcttttgtgtaaatcctcacgcccccttctctcttcagcttctcctgtccctatcacagaataccacatttagagctgtcagtgaacaggcatgtgtctgaaagtcaggatttcctatttgagataaaagtctgcagtttccacaagttaatacagcaaacagaccaagcatcttttttttcttgcttggtggactcaggtaaaattgagctgctaagtacccaggatttatggaatttgttgctaatattaaagagatttacatgtccgttatactcctgtaggtttaatctgatcactacaaaatgcttagaatacgttgctatttcaaggacaacttgattatttgggtgaaagctggatctttgtatgtagacactctagattttggatgctaatctacttcattggttctttgcagttccttcagccgcccctgagaacgtgtcagccgaggctgtcagctcgacccagattttactgacatggacatccgtgccggaacaggaccagaatgggctcatactgggctacaaggtgtgtgatcacaggatgacctccctttgcttaaagagtgggctggggaaatgggagcatgtgctattcccccaaagcaacgagcttcctcttctcctacagatctgcagcgtcagccagtttgtgatttttattaagatattcagttgtcttatctaagcctcattgcagcctgggaattaggcatcagtataactatgacacaaatgccaaaacagggcaccagaagaaaagcacagccggagtggaactgacctccgggcctgcgcctgactctgccctcgctggcctcagtgccgcgggccagttactgaagccctgtgcttgtgtctccccgcttgtaaaacgggaataacgatggtagctttgtcccagggttggtgtgagaattcagggggtcttttacacagcacgccttgctcatgtgaagggctgggtgaggtggatcgctgtgtgcatgtttctatgtgtgtcatcacggtcctagcaatggcatccgctggcagggttgaatctgtcccagcttctctggggagccatttctgggttccatcttccatgcatccaccccacccctttaaaacccccttctgttcctcgttccatcactcggggcgacaggctctgtctccccatctgctccttggctcagcaatgccaagcatcagaatgagctgtttcggacccggccagcgaggccacgcttgtctcagtgctgctccctgggttttgagcgtgcctcctccacctttccgtacttcacatccctattctttgttttccccgcctgctctcccatgtcttctcccttccccgggtgttctaagtgcgccctgctggctctgtgacacatggcagtcccgttgaggggattcagtgaccaaaacttcacaccacattcctggggccccgagaaacgcgcttgctgtgctattttcaaacacctccctgctgatgctatcctttatggccttccaggtccccgatctcagggagcagttcagagaaggtgggcattgagtgaggtcttagcaggaggccctggagcagagcagcttggggtggggtgccctggaggagagcatagaggagagcagcttggggtggggtcccctggaggagagcagcttggggttgggtgccctggaatagagcagcttggggtggggtgccctggaatagagcagcttggggtggggtgccctggaatagagcagcttggggtagggtgccctggaatagagcagcttggggtggggtcccctggaggagagcagcttagggttgggtgccctggaggagagcaccttggggtagggtgccctggaatagagcagcttggagtggggtcccctggaatagagcagcttggggtggggtgccctggaggagagcagcttggggtggggtcccctggaggagagcagcttggggtggggtcccctggaggagagcagcttggggtggggtcccctggaggagagcagcttggggtggggtgccctggaggagagcacagaggacagcagcttggggtgggatcccctggactagagcagcttggggtggagtcccctggaatagagcagcttggggtggggtgccctggaagagagcagcttggggtggggtcccctggaggagagcagcttagggttgggtgccctggaggagagcaccttggggtagggtgccctggaatagagcagctcggggtggggtcccctggaatagagcagcttggggtggggtgccctggaggagagcaacttggggttgggtgccctggaatagagcagctcggggtggggtcccctggaatagagcagcttggggtggggtgccctggaggacagcagcttggggttgggtgccctggaatagagcagcttggggtggggtgccctggaggacagcagcttggggtggggtacctacagcatgcacagctgcagatggcccaaggaggccagagctcccggtctgtgtgaggacagcaggtcttctggggcaggaaaccagcttccatggctggaaaacccagggggctgctggctcctgtggcaggaagcagagtgttgtctgtgttcataatcgagtctttgttttagtggctgtggttggcatggctgcagttgggccctcagatcttgcagattatgaccaggcagcaggctcgccaagccgtgggcactaactcaagctcccctggagcgcagtcactttacaaccaccttcctccccaaatgccagcatggacaaattagatccagaagccctgcacacagccatcctcagggagaaagcacagttggctgggccttgattcacgaagggggcctgccccatgccacggcggtccctcctggcacccgcctcctgataaccctcgtgctgtgtcgataccacagatcctgttccgggccaaagacctggatcccgagcccaggagccacatcgtgcgagggaaccacacgcagtcggccctgctggcaggcctgcgcaagttcgtgctctacgagctccaggtgctggcgttcacccgcatcgggaacggggtccccagcacgcccctcatcctggagcgcaccaaagacgatggtaggtccagggttcgcgccttcgggagccttgctgcctcccaggttggcctttccaatgcaaacaatttggattgttgtcgcttttaacttaattttcaaaccactttcttttgcagttgagggaaacaaaacaaaattgtttttcagtcactgagcacttatatggccaatttcagcctggagtggatttttacagcctaattatgaacctgtactgagtttccctcataactctgccgtgggcagtgctggggagaggcagcagaggctggggcggggccgagctgtggatgtcagctgtggacgctcctcttggcaggggctccacacacttcgtgtagtgcccccttatctggcaacacatcccaggaccccagggaatgcctgaaactgcagataaaaggagactactatagtttaaaaaatccacagtggacctcatgccttacttccctcggtactgccccgtctcactgtttgcattgtgggaggtaattagaggttatagaaagccccgtgctggatggcccagggtccccagctccctgagtttctggacctgaatcacaaggacgccttgccagctttgttttcatggaactctaaatcatcggtaaatatgttttcccactctgcagatgtcaaacacataaaggttagcgcctttacattttcattattaaacagactgtaatgaatacatcagggagagaaatgcggatctctcccgccacaacacccaccctggggatcggagtggctgaagaagtgaaacacctgtaggttttcttaagcatctttgctgagtaactaaatgagcccgaaagtcctcttaactgctgagtggaaagcactctctccacgttgctgagagagtgccacccctgatcctcgcctcgcctcacggagagacgggaaccctgcagaaggctttgtccatccttccctgacacaaggtctcaggctagagggagatccaggagggaatgggaatgtgggtgttgtttccttgcaaaactatctcctgctccagtgtattccaggtttcccagatgaaagtaaaaatgggcctattagaaactgtgtgtaacagcaggcccactgcaactgttccctcctgaagcaggcgctggtgagtcctggaatgccgctgcttcctctcccacagcgctcctgtagacatgccttcctcctctgctttccagcataatccccataaacagcctgggagagggctcaggggagcaacgctgcttaagtctgaagtcagcgtttgcgtatctgtgacttagtcctagttgggagcctgtggcctcctacagacatttatttcaccccaaaataggcgtcataacacacattcagaatttaaaatactgttcccagcttcatagccagggacagacgtcagcggcccagaacgacgaacatacatccttttattttgatattgattgtttcatgcccattgcctcttacctgggaatcggtcagttattaattccaacaagaagctctcatactggccacacacttacttgcctgttcgtttaagtaaatgtattttatgagggccacaaccctattattcagcagttccaccacacctagctgctttttcagttattggtgccccgaaccacacacaagaattattatatgcatttgtgcacaccaactcttaattatctaggatgatgcaggagagaggtggcatgcctacgagagaaatgattgaggatacacatgttatttcatcagaaattgtaacctccgttagagttgggaggaacttcaggccgcctcatctaccacctgctttgcagatgtcaaacccagtaagggaatccgagctcagatgagggaaatccttcctctcaacctgatgtttgctctcagagtcatttagtgactggtctacttgtgtcctggtaggctggttacactcacactattcctggcatagttcgtgaaccctgcttttgagtcttggaaagcagacgggcagggtttaaagggaagtgtttgctcaagatccttagggagccacactaccagtgacattccaaaagtcatcagtccaaaactttagggggttctaaacccacgacagtgtagcctgtggtagttactgcagccagctgaccctcggaatcctgtgtaacctgtcacgcacccaaggaacactgtcttgagatctgaatccctgtggtttttcccttcagccccaggcccaccagtgaggctcgtgttccccgaagtgagactcacctccgtgcggatagtgtggcaacctccggaggagcccaacggcatcatcctgggtaagggagcggcggtggccgggcgtggtggctcaggcctgtcatcccagcaccttgggagaccgaggcaggtggtttgcttgagcccaggagttcaagaccagcctgggcaacattgtgagaccccatctctccaaagaaaaaattcagactattagccgggcatgatggcatgcacctgttggtcccagctacttgggaggctaaggtgggaggatcgcttgagcccaggaggttgaggctgcagtgagccaagattgcatcactgcactccagcctgagagagagtgcaagaccctatccccaaaataagaaaaaaaaaggagtgatggtatttaaaaggagagaaataacaatcaagttgatgtcttccgtgtttgttagatgtttatgaggttaaacaaaaggctgtctccagcagcctagcatttcctgaaccgagatgatcatgggcctcttgactgttttctgagctacgtactaaaggtttttcttatggaatgaaattcacatttttttaacgtggaatttcttccattcgtttgcggctcatggcgataccgtttgtaaccgaccttcccttcctctctgaaatatcaggctatgttgatgtgtgtttgagaaacaacaggctagtttttcagagaagatgcagacctagccttggttcccatgttcctggaaacatctttctgctgcagcacttgcacccaatccttgtaagaagccgctgagatgaagcgcatgccctgggtcccggggaacgcgtttacttctgacttttcagcattacagccagcataccaactctggtaacacagatgaaaagcctgaatttttccgttccccaaagcaacaaattctattttaaaacatcccagttccttgactcattcaccctttcacagagacaaagtaaggactttccctgtgcaggtgtcgtatgtacagtggggggtgaggaatgaatgaggtgtgcctgtcctcaagttgcccacagtcccgtaagggagacacatgttgagagtacagtgagataagccatctgaaagaggtttcattcagtgcctcacacacagctccttctgggtggggtctctgtgggtggaagtctccttttgagagggatctggagataggtggcttctaaagccttggaagaagggaagggggctgtccactcagccaagaccgaatgctttcagcctttgggagcactgacagctccaaggctggggatggaggctgggccgggtcttgagctactgtgagctccctgctgtgtcctggagaatgtggccctgagacctggacgttttaaactggcctgttagaggcaagtgcagcagccacagaacattgccccagccccaggttagctctcgggatattgccataccagacaccccgattcggctagcctgtgttctaggtgatttacggtaaagttataaacccagacttacaaacaggtggtaaaattcaccacttttgcctgcatttgatcttaggattctaagacttggtttgaagaaagagtttcacatcactaaaaaaaagtttggaggcctgtgttgaacggcagcaggaattcatccaaggtctttgagtgggaaagctgcgcaatcagatttgccttgtaggtaatcactccggcagcctgagaagggtggacggaaagtcagatatttattgagcccttgcttccctgagagggggcctggagcttcctaagtcttctgcacaaggaggctgtgacctattttcgctttgcctctttctttatgtgatttctggagttgctagacagaagtgtttggctttgagtacggcatttctcaatcaggtgacctttggaattgcgggttcctgctactaaaatctcagttgagcagccaccttggaggtgagcatttcagggcctggcccggcggagagggagctatgagccacatctggtgcctgcgcagtgagcccagtcttggggtaggaaatggtctgcccagcagacagctgtggcgaggagatttgcaggagccccacccaggcaggccctaacctcagcacagcacccaggcatcagccttttctggaacaagcagggctaatatctgattacccgggagctgtccccagcatgctgtgaaacaagaaacattgacagagtcacaggagtccacaacaacagtgttccccgtgaagaagcaggctcgccccagccccacctccaccctggcagggcccctggctcccactgccggcctcggtagaccctcccggcaagtcctcactctatggtcacctccgtccactcactgtcagcttaccgggctgccaaggatcagttctggagtgcggaggcgtgggagcggtgcaggagcaaagcatgtgcttcatctgtgcttctctcttgccacagacggacgcgtgctcagattccagtactgtgactttgacccagggcgtccttgcacacgtggggaggctctggcctcagccggctctaggccccgccctctgcctgacacccacttcagggcatctgccctttctgaggactcacgccgatgtcctctgtagccccgggtcctcactgccccgctccctgcacgtgtctacctggtgaggcttctcctcagcacgcccgccggagtgaggcccgctgtccactgagcccatcagctggttttatcatctgtcgtttactttccagactgtctctgacatttctttttccgatgacaagagcactataaaatgataattgaggccacaatgaaatcccatttcacattcgccagatttggcaccataagtagctgtgataatgccaagtttacatgaggatctggagaaacaagacccctacacccttgccaggagcgggagtttgtgcgtccactttggggagtgctcaccaggaaaggtgagcgcattcacactgcaccccagacgctctgcacttccaggccttcgccctagagaaattcttgcctgtgtgcacaaggagaaacgtacaaggatgttcattacagattcactgaaatagcaagaaagaaagcagctgtcgtctgcacaagtcagatggcacgaaccttggggctgcctgcttttcctttcccctgtgttttcaacactgcatcacggacaagtaggccggcagcctgggtaacgttttggactcagatctcagcctatgcttattagctgagtgaatttatgcgtgtttcttagcattcccatgcctcagtttccccatccctcaaaggggaagcacattcgtgcctccctcactggttagagttgcacttagaacagtgcctgccacatagtgagtgctgagtaaacgttagcttccgtatcagatcgaatatttcatcgtttccctggcaccagaggaggctggaggctccctggacttgagagctcctcctagaccattgggggctcagcctggtcctagtattcccgttgcatgcagcagtggtgtgctgccttgatttgtcctccataactctggttgctgaagcagaggcttcttgccgacaagagaaagaaaacttagaaggctgcttgggttacagagtgttcctaaagtgcgtcgggaggtatggatcttgatttgtggtcactgaaagccactgaagcccaagtgaggagaaggataatcacttaaatactttgagccctccaaccgtgctgaacgctgctgaatcacacagcaccgtgtctacctgcgaggcagacaacgtcactgccgagcctcctctgtcatgcagcattggcttgtaattgtaatgcatgttgtccgggtaacctgtcacccatgggtcattacagccggcacaccacacggcggaggctgcaggaagacaggaagacaattcctgcaaattcagatgggtgttcacaggggagaaagcaaaacatcttttcgtctgactcactttacatccagagaccttgaatcaatgttcccactctggcagcttggccttctgagtacataaacacctctgccgcccgagcttttgtaatctatatcaaaacatgttcttgcatttccaaaagagattaacagcgtgaaccacagcaggcacctagaggagaaaacacttgcttatttgcgtaaatattttactgtggagtgcttttagcatttagaacttttctttggggggatggggttggaaccccctgagtacagacgtccctccctcacccaccagctgacaccacatggccttgactggtattacgctaacgtgatgatgcgtgagctcttcagacccacttgggcctgccctggccagacacgcgggatcccgccctgccagcaggagggcctaacatttacctttaagcttattacgaagggtgtgcgggaactctgcggagaatcaggagctccagcaagtatgatccctgttggcagattcagcgttttgatccccagcccttggatggataagctgcaaaacccacaggccacggcatctaggctcggccagcgtgggcgtcctggggcgattcagtggcttgcgggttctctgacccacttgcccaccaacagcagctgcagagagatcggcagcacgtgccccagatggtcgtgctttggagtcatgagcgctggggtcccagtgatgctcactgaacagcaactctcagacaatgccttttgtttcccagggaagtgcacaatttattaaaggtttgcaactagctgggcacggtggcacacacctgtaatcccagctactcagggggctgaggcatgagaatggcttgaacccgggaggcggaggttgcagtgagccaagatcgtgccactgcactccagcctgggtgacagagcgagactctatctcaaaggctttgcagccacctaaaacgtccggatagaagtctccaaattgctctgtgtatagctgtgcggcgtcagtcttcaggctgacctggagctgagatgcctacaaggcttccagtatccagcctcagctccttagtgccaccttcttgtgtctcgagcagtggacggttctggaacttgtctcaggcccgtggcgcagtccctttctggattctgattgtctaaatgtgcagtgccacctccgtcttccaggtgtattcagaaacccactcaggcctctcacttgatgtttttaatcttccatttggatcaatgtgtctcgtacttggccttgctccttttaatgctcatattatcataattcacccatacccttaaaaacagggctcctcgtaagccgcattttactgctgctattgattcggcctgttcattcctccctcgcacacgccgccgtcttctggccttgcgtcgctgaagtgcagcgcactgatgtttctgatctcgctgtaaccgtaattacataactagccttttccacagaaacgctcttatctctgaacaccatctatcattattctctaaaaatgcaaggactgctactcagctgctcctttgtgccatttatgtacagaaaaaaagctgtcttctattgtccatcgagtctaggactttttaaacgtgtcaaggtgagctataggcattcatctttatgttcagcagaccgtggtgtggcgaccagctgatattatctttattttagggcaaataataggaaggtacaaatagaacacacaggccaaggagttttcttccagtgcctagggaaccagatcagagagagaagaagaacccagatttctgcaattagcagggatgccgtcgtgctttgcaatctgcatacattgtctcactggggctttgccaggcctgcatcctaaaggtcaggggaggggagggcgaccccactgcaaactccccccttcctacttgggtccagcggcactgccacgcagtgcactattaaacagtcattaaaattcatgcttctaaagggaaaacatgcttttgttatgttgtgcagaaatcgcagaatgaaaaactcatactgagtgtggaaatccgggtttgttgagtactcatatgcgtagaaaaatgattaccaaaggccaggcatggtggctcatgcctgtaatcccagcactttgggaggctgagaagggtggatccacgtgaggtcaggagttcgagaccagcctggccaacatggtgaaaccccgtttctactaaaaatacaaaaattagctgggcatgttggcacacacctgtaatcccacctacttgggaggctgaggcaggagaagcatttgaacctgggaggcagaggttgcagtatagccgagatcataccattacactccagcctgggcaacaatagtgaaactctgtctcaaaaaaaaaaaagagagagaaagaaagaagaaggaaggagggaaggaaaagaaaagaaaagaaaattgatgactaaaaaaagtcccaagacagctacagttatctctgagtggcagcatggtcctcctgcagaccagcataccatcaccccagcttccaggccatcacctgggactctgcccaggggctttctgtggctgccggagcctgctaggttttgaggactgggccatacattcaaggggtgcccccaacagcccttagccaaccgctgagaggcagtgggcgcacactgcagctccccccgtgtcatgtgttggggacgaggctaacaggttctccaccggcccccacagtgggaggagcccagccccacggcccctgccttgatgcacacacgttcatcagcttcttctccgtgtcacttctctacccaccccccatttcctggagtgacctcccaaatcgccacttgcactccagtcctggcctcaaggtctgttcgtggggcacccaccctagggccaaaggtgatttcatgggtttttttttcctgctttttttgggtggcttttatacaaaagaagcatctatctatctgtatgtataaacaactatatatgtgtgtatatatgtacgtgtgtgtgtatatgtgtgtgtgtatatgtgtgtgtgtgtatgtatatatgtgtgtgtatatgtgtgtgtatatgtatatatgtgtgtgtatatgtgtgtgtatatatgtgtgtgtgtatatgtatatatgtgtgtgtatgtgtgtgtgtatatatgtgtgtgtatatgtatatatgtgtgtatatgtgtgtgtgtatgtgtgtgtatatgtatatatgtgtgtgtatatgtgtgtgtgtatatgtatatatgtgtgtgtatatgtgtgtgtgtatatgtgtgtgtgtatatgtgtgtgtgtgtatgtgtgtgtgtgtatgtgtgtgtgtgtgtatgtgtgtgtgtgtgtatgtgtgtgtgtgtgtgtgtgtataatcttgaaaagctgaagccccaggagcgctatgggactgaggggctgagagctttagcaccgcatcagagggcctcgccctgcgctgtctgggctgtcttggagctgggtggagccctcgggactcaggcagggagagtccatcgatgggaacgatctggtaatggggcagggccccaggcctccctgaacaacaagaccccactgttctcccatgagcctattcattgtgcacctctgggccagctctgcaaacggtgattcctgccaggcccacactctggaagtgtgacctccagagtgccttgtccccctgtcaccacctccctgggagcacacaggttcccttcctcgtgctctggctgctgcagacagtggcgctgctcctgcaggccttctctgccgccccgctccaccccagcctgcacctcacaggctgctcgtccccctctcagatcagtggctttgcctctggcccccgctgcatagcgctctccctgggcccacctcagctgacctctttcctgatgttactccccaaggctcttcccgaggactctctttctttggcactttctggaacaattcagcctccccagatgggagccctcacatgctggaggcgtggctctggagctgggcccaagtgggacccccggccccacgatgaggggctgtttcttgatgttttgcagtttcccccactctgtgtcggtcaccttcagaatgtcctgctgagtgactttctctgaattgttttctgtttttttctcccttttctttaatcatcagaatcccatcatactgcagcaggggggagctgaggccaacagcagggtatcctgggaagagctggggctcgatgccgagggaccccagccctgccctgtttactgtgtgctcgtgggcacccagcccctccttgcctgcaaatgtgaaatggaaacaggaatatctgcctggggaatgtcatgaagtcttaatatggtagctatgaagtgcctggaatatagaggcccctaataagctgtgtctccattttaaaaaatgattaatagaggccagacacagtggctcatacctgcaatcccagcactttgagaggctgaggcagaaggatcgcttgagccgaggagttcaagaccagcctgtgcaacatagtgagaccccatctctattttaaatttttaaaaaaatgattaataccaagagatgagaactgagagtcaggcagagattagaatttgcctgagggctgggtcaggagccaggtctcccggctccctgctgtctagtcaggagcttctgagagagaggcaaggaccacacacgaaaaacaatccacaaacccgaggcagtgtatcctccaaggcaagtgaggtgaggcccacgtggggcagtgaaggggcaagtgcataaccacatgatggaagcctgtgtagtctgcggcatggccaaaggcagggctcaccttggaggacagaagagtcaggtggggccattgatagaaaggagggtctgtaagcaaacctcagacagcttggcaagaagaaaccagttcccacataatccccaaatcctgtgatccacaaggagtgcctttgaacaacatcttcatttcatctcaggattattacctctagcaatggaataatctgggcagagataaaacatggtgaaacagtaaagattaaacaataatgaaaacacgtctgtaaccatgccctgctcctgaaagtaaataatacctcattaattcagacatagtcactgaaaggcaatttggattttgagcgagaagtcttaatcacacacaactctccaacatattaagtaatgaatcaagggaactcaggtaggctggtgggatccataggaaaggcatgttcctggccatcggggatgctggggaaggccctcgttagtcgtctgtcggggccaggcctccaagcatcttccacacagggctttctctttctcttttagggataggcatgtttttgttgttgtttttgagacagagtctcgctcagtcgcccaggctggagtgcagtggcgtgatcttggctcactgcaacctccgcctcccgggttcaagtgattctcctgcctcagcctcccgagcagttggcattacaggcacctgccaccatgcctggctaatttttgtatttttagtagaggcggggtttcaccatcttggccagggtggtcttgaactcctgaccttttgatccacctgcctcggcctcccaaagtgctgggatcataggtgtgagccactgcgccctgccgggataggcatgttttttcacacggtgaagaagaaatctttttagccacttgtgcaaaatcagtgagatgatcccacctcgacagtgtggagggagcaggctgaaccctacgcatacatacatgagtctgtttttaatgcaaacttgatttttgctgccttagcgaaagattcgtatctcttcatctctaggaacgatattcagatgcctgaacttaacactgggttacacatcattcttggtggttttggttttgcgtttttgttttttgttttgttttctgtttttgctggagacagagtcttgctctgtcacccaggctggagtgcagtgacgtgatctcggctcaccgcagcctccgcctcccgggttcaagcgattctcctgcctcagcctcctgagtagctgggattacaagcgcccgccatcacgcccggctaatttttgtatttttagtagagacagggtttcaccattttggtcaggctggcctcgaactcctgaccttgtgatccgcccacctcggcctcccaaagtgctgagattacagccatgagccactgtgccctgctaaagttttgtatttttagcagagacagggtttcaccatgttggccaggctggtctcaaagtcttgacctcaagtgatccaccctccttggcctcccaaaatgctgggattacaggcgtgagccactgtgcctggctgctttgcactctttacctggcacatttgcatgatttttgagccatgtgaatgttacacagctcaagaaatcataacaatattgaatgtctttagacaaaaggcagcttaagcctagaaggtctccaagatgaacatcgattatgtggccagagatgctttttccaggcagaacacagccgcccagagacctcagaattagggtcattctcccagccccgaggaagcaggacattgttggggaatttacattttaagggggaactccgacccagggagtcctgttctgaggcacacgctgtaggtagttaactcaatcaggcattgcaaagttgggggtgtcactcctcagggctgggctaggggcttggccatgtctgttctgggcccctgtgctgcttccggtgggcattcagcaccctgtcctggagctgcaggggcctaaggcaccacgcccatatcagtgcctgtggacaggtccggggaataaggttccatggaggctgtgaggaatgataactctgtggtcataccggccaccacagggtgaggaactgctagggaaggggtcttgccagctggaggagggaggagaagtcgtgactgcaattgttttataataatattaaagccaggagcaaccaggcatggctgtgccagccaggtcattaccaccgtgagcccccagagccctcctggcaccccgtgaggtgtcctgccatatccttgcaccatgtagtccagcaaactgaggctgggagaggctgcatggctcatccacggtcacacagtgaatgattggcagagcgggattccagcccagaggtgcacccccaaaggtgtgtccttcctttgaagggcccgctagcttctattggagaggatgcttctgcgcagtgggccctggggtccgtggttccgagcaacggggacctggcgaggggatgctctccctttgctcacagatcggcatgggtgtttgcttctcccaggaagagtaggcacccatggggctccagcccgactctctcgtcactttctcgctggggacccatcttggagcttcacagcctcgtcctcatccttgtcttgtatgcttcctgacaggcctgcggcgagggtctggcatgggaagcgttgcagggatgcagcagggtccctggatgtgcctagcagtgtagccgctgtggtcacgctctcctcaccgtcagagtgcggggcggccaggagccccgaagcctcagactgagcttccattgtgtgtgcacggctgactccctactctcactgtgcaagggtcggggaaacgggaggcctgtgggaagagctggccctctccctactctcactacacaggggtgtgggggaaggggaggcgtgggggaaggggaggccgggggaaagagctggccgccgtctctaggctgccctcggtcagtcagtgactgggaaggaacaggagtctagcagggacacccttgccagagacctgaggccagcagggccacatccaggaagtctcagaactcccggtccccattgtggggaagacagcccgtccactggaggcagggcagcggctgcgacagccactctgggggcctaagttcagggtcctgcagacacctgcgcctagaggtggctgcgtcatggacagggcagggcgtgtgtccctgtctgtgtggcggtgatgacggtgctgatggtgagcggtgatgcctggggcctgatgtgaggatgcccttgaggtctgatctccgtgtaattgtcctcccacctcccagatggcgggctggggaggggtttgttaaatgcgtggatgagtgacaaggcgcaggagctgggaggatgcctgtgagctcggtcgttcatgaaccagagacctgagagcaggaagagctgagagagggaggggttcacccggaacagaggctgagggcagggggcaagcagcgtggggtcgcccggcagctcctccccacagagggtgagccaccagtgcagaggccactccacgaagaggcagcactgatgagaccggagcgcggctctgttccccccgtgcgtcctcccttgtttaactccagcagttgattttttttggaagccacagcgccccgtcatttctggttttaatcagcgcaggagctcagccgctggaccacacgttgtctgtgagccaggcagggtgcggactggagctgcagagttaacaaggttcctccagatgccagcgggggaggcctggggcggccagtggagaggagtgatcgttaataaggaacgtctggtcaaccccaagcccctcccagcggaggaactgagcaagccaggagccctccctcaactgggcagcacagggggattctgtaagcagagctgccctggcggagctgctcgggaggggtggggccaaagaaggggccggatggacgttgctggggtccctggagggagctggggggtcagaggtgcaggcagacagggaagacaaaggagggaaggaggagtggccgctgtggagctgctgtcctgcctggggaggccatgctgtcttttgcaagaattaaacgacttcctaagagagcgacggggagagccagactgcaggagggagggagaggcagagactgagaagccacagccctctggggagcagggagggactgggtccctgtggcatgctcgcctcgtgcccgcatcctaaggaaagatgaacccgtgttcacaccttgttctggtgaaggatggagcaggaaacaagcttcacagggaaatccacgtggggccccaccattcatcacagccatgagaccaccctttcagtgcacaggcagtgacctccagagacggggaagagacagatggccttccaggggtcagcacagggtgtgggcacagggcttccctgtgccgtgggtgactggctcagcagctgtctcccatgtcacctgcctgcagggtaccagattgcctaccgcctggccagcagcagcccccacaccttcaccaccgtggaggtcggcgccacagtgaggcagttcacagccaccgacctggccccggagtccgcatacatcttcaggctgtccgccaagacgaggcagggctggggggagccactggaggccaccgtcatcaccaccgagaagagaggtaagaccttgggggacccgggggtactgcagatgttgtgggcacagcttcctcaatcaggccctctggggtctgcggggtacctgggaggcttcggccttcccttcggagaaagagaagggatgtgagcatttacaaagcacccattgcacctgacatggagctggacacactatcaaacagcattgcattcacaccttcagcctcacacctgctctctcagacacgtgagcactgcgttcacaccttcagcctcacacctgctctctccgacacgtgagcattgcattcacaccttctgcctcacacctgctctctcagacatgtgagcatttcgtgacacactttcagcctcacacctgctctctcagacatgtgagcattgcatgacacactttcagcctcacagctgctctctcagacatgtgagcattgcattcacaccttctgcctcacacctgctctctcagacatgtgagcatttcgtgacacactttcagcctcacacctgctctcagacatgtgagcattgcataacacactttcagcctcacacctgctctctcagacacctgagcattgcattcacaccttcagcctcacacctgctctcttagatatgtgagacggtctcaggtttaaggaaagcaacattgctcgcagaggctgagtacctggggcaaggctgcagagtcaccacatttgaggttgagctccccgaaagcagcccccagtctctgatgttaaacccacgtcctccgtagagcaggtgctcagtaagtaagttttccaaataactgccttcccaatgagaactgccgggcgagcagggctctgctccacgcacggagacaggtgctccatgcactgcacttggcctatccttcctgcagcccacggagcagcatggcattagctctgatttttaccaaagatgagacagaggaaactgagagagttttattaatttgcccagacacacaactgcagagctgagatttggactcccctctgacaccacgaggccgactcttcccatgaaagtctatagtgggcgcccttctcagtgggctccgcgcatgtcctcgggccttgcagcgtccagggttggtgccacaggaccctcacctcagcagccccagctcccactccaggtcctgatgtcatggccagacccagggaccctgtgggaatgaggacgggagggagcttgcaggcaccactgcagggatacttggagcacacagttctggccacgctcctatttttgtttttttatttttgaaacaagtcttgctctgttgcccaggctggagtgcagttatgtgatcataggtcaccgcagcctggaatgcctgggctcaagcaatgctcccacctcagcctccccagtagcggggactacaggcacacaccacccagctaattatgttctgaagagacagagtcttgctatgatacccatcttggccgcccaaagtgctggggttacaggcatgagccactgtgcccagctaatattttaatttttgtagagatgggggtcttactacgttgcccaggctggtctccagctcctgggctcaagcgatcctcctgcctcagcctcccaaagctctgggattgcaggtgtgagcccctgcctttggtcctcccatagcattcagtgaaagcacatcccctctgtgaccattaccactatcattattattgttattagctggagggacggaagccctcagtcgccacagacacccgaggtgcttctgcaatgtaaagcacatggaagggatgccctgtgaaaggagcgcccctatccccctgctgccaccctgggtatcagcactcagggctgtcggcttctcaggaagatggtaatggctcccaagcaaacgttttgacttctttctctaatgtatttgtgtggttttatggttcatttatcttaaacattgactgtgcccctcccgcgagccaggcacgtgtgcaggtgcatcacagacacggtctcacagcaggtcctcttatttccccgtgtcctgccccacagccccgccccacagtcccgccccacactatgccacctgattatccggaccagagatttcggagattttccattggggcccccatcctccatcctcgtggctcagggagagggaatccaagagacttgctagttaccactaagtccaagagagcctttgaaacgggatacgctgggccacctcccctccggagaccaggtgaaatcacaagggccagaacgtgtgcttacggaggcaagtgctgatgaagtgagacgggagccctcctcccacacccgccactgggggccgacaatcaattgcagctttacacacgccacgcattctaatcagaatcaataatcttcatgataaacaattaaacaattattccttccgccgcggaacttctctgctgaaatcgatggggtgcagaggcacagcggcggcagatgatgggcactccaggccgggcctggccccaggcaccccgcgtcccgcatccaagctactgcacacaccagaggcagtgacagcccagaggtgccctcacctacagcagcactgagtagatgccgtagatgctttaggccctgggtgactgcaagaaggaggaaattcagcgttaaaggtggactgagcacaacatcagaaaaagagagaccaaagggaccacagggcttggaacagcccccaagaccctgcgaccccagctgtcatcacagacacagtgcctggtggtctggcagcccagggactcctgtgtggctttgttcctgtctgttggtctctatgagtagtgcatccgaagtcagccttaagatagctgctcagctgggtgtagtggctcacgcctgtaatcccagctctttgggaggccgaggcaggcggatcacgaggtcaagagatcaagaccatcctggccaacatggtgaaaccctgtctctactaaaaatacaaaaattagctgggcgtggtggtgcacacctgtagtcccagctactcaggaagctgaggcaggagaatcccttgaacccaggagacagaggttgtagtgagctgagatcacgccactgcactccaacctggtgacagagtgagactctgtctcaaaaacaaaacaaaacaaaacaaaacaaaaaaacagagcctctcatctccctgacccaaggaagggactggcttcagactgtccaaggcatgcaggcagctctcatgggcaagcagtcagccctgtacagcagcgtagcctcctggggatgttccttgggaagggcagcctctcacatgtccctggtctgtcctcatttggttgcagagcggccggcaccccccagagagctcctggtgccccaggcagaagtgaccgcacgcagcctccggctccagtgggtcccgggcagcgacggggcctcccccatccggtacttcaccatgcaggtgcgagagctgcctcggggtgagtggcagacctactcctcgtccatcagccatgaggcgacagcatgcgtcgttgacaggtactgagagagcaggagcacctccccggggaacggggccctggccgcctccagccagctcctgtccagatagtggggaggctgtgtgggccaagcaggtgcacccctgagagcacaggccccctttctttttgacactccccatgctgggaatcccagaactcctgggtcctggagctacttccaagggcccacccccagccgcttcccggagtctgctcttccaggtgtgcagggctggtttggtcaccccaggacccagggattggcgaggcaggggtgatggggggcaggctggacatgtgggctggagtcctagcccctcccaaggctggcaatggggaggggaccatgtggaggagggctgggctggcctcgggtgtccagggctggagggacgttgcgtccccttgcgttctcgaaagcagcagggagatggatggcaccacgagtactgtgcttccttagtgatggctggggaagatgggagggcatgcctaggacacgactagaatccgtccactcactcagttgtttactggacctctgggctcagcatgggagagggttgcattgacaatagcagcggcgttctgtgggtcccccagggtcctcacaactgcggtttacagacccacccactctttacagacaaggaaactgccacagtcacacagatgggcatcccagggcttagaagccaccccaggagtccacaccctcaccacatgccctgaccaggccctcctggggcctgtctggttcgcaggccctgcctgggcagggccacccgggacacccgccttgtgcttctcattggcccagagtttggtcacttgttactgagctcacactccaggctgtggagcgggggtcttggagtgagtccctccatgtcgcagggctctggagcctgcaccaatgactaagagggtagaggggccaagacggttgtctccaggctggccgagcttcctctgtctctcagatggtcacataggtcagctctgcgtccctgcagtcacccagtaaggggagaccatgatcccactctacagaggaaggccaaggtcagaaaagtcggtcatttgctcatatcccccacccagcctccgtggcgcccagccatcctcgtcttcgaggctgcccgtctcagcccttcctgactgaacctgaatgtagggagggaggcaggtcccaggtgaagcccctggcagctcctcagaacaccaccctggccccactctgccctgggggcaaagttcaggctttggagtgagggctgattggagtgtgggtgtaactggtcctagatgtgacaacagggggtttcaaagagaagagaaacctccaaaacccccatccctggcttgaggaccaggcccatgacagaggcgaagcacttgcccagggaggggtggccgaccgggcgtctcagtacagagctgtgaagctggaactgtgcaggctcagcctggcttctgccacttgccgttgagtgatctggggcaagtgacgggctctcaggtgtctccagctccctggcctttgagttgcgaggcttggaggtgataaggccctttggacggtcatggccatggatgccagtatcgcctttgccaccccacacagtgtccccaggaggcacagctgggtgtcaaatgcaaatcctgaccagagtccctgagcagtccaaggagggtcacacggaccatcgggaacccatgctgcggctcccaggcccccattggagaccacagaccagcaaggaagccagcgccccagtgcacagctccagctctctgtggccccagaggacccaccctggcacagtcaccctctgcagtctcatggtccaagcagccctctgctcttctgaaaatcgaggtggaatggtccctgcgcacggggcttgtttccagcaaggccagagccattgcctggcttcccctcttacagggcacaacatctggtgaggtccgtatgctggcgggttggaatttagaaaagctgttccgtccccacaactgtggttatgcccctcatgttaggaaaacgaggctgcagcagctccggcttgatgtcccctctgaggtgttttccctggtgatctagtcactcagcttccagacagttaaagctctgacaggacttcaccaccaccaccgccatcctcgtcgccatcattatttccggaatcccctcatcctgtctagcacctgtcattttcaacaccacttccatgtgtcatttcatacgatctttgtaacaaccatgtggacatgcagcccagacttctcactattcccagtttacacacgcagacattgaggcagagatatcttaagtaacgcatatgcaggtgccttgacgtctctaaatggaagggatatttcctgaggtttttgtagttgtcacattccgtgagccagaggtcaaggctccatagacacagtccacgtcctacagttaatttacaagggtctgcgacgtatgaaaacccagtgtgtgtgcatctgaacaccaaactttccacagtcagtctccccttagtagctgcgtggccttggaaaagtccaacccttggctgcctgctaggactctgtcctctcatctgtgaaaggcagggctggagcggggatcctgctgttccctccagctctgtgagtccaaggtttgcctcattgctgaccgccacggaactggcagccaagaaataaggcaatcggaagagtcagactgtccgccaggttcctgccagcatctcacttgccctttgagctacagcaacagaactcgaggggcacagctctctcccctccagaggaaggcactcctagtggcagataccatcctcccagagccctggaattctcctggcacagccccgagggtcaggggagtatggccaggtgcgcccagcctgacttaataaagtacacaggatgcttagcttaattggcagtgtgctcacatatataaataacctcaccctttgtgtaaccatctaaaagaaggaaaaaaaatatccagccactattcctgaaggcttctgaagccaaacagactaatcgtgtgtccgggacttcatgctggcaaggagaggtccatgtttcaggacagacagtttaatttggtataggagagaccaatgtcaatttcctaatgggccagaactaggacaaatgcttcctctgcctatcaatagagaacatgtcacaggagaatcccaggaaagtgatattttgtacactgccacagtataatctcccttcctgtttaataatcctgacagctacattttactttcaccagttgtgtgacatctgtgagtatccagaaaacattaagagtttaaatgtctcaatttggtgactgtgactacgtccagggaatatgggtcgagacccccagggagaggggttgggtctgagacgtgttcaggtgttgccagtgtctggttggtggttgaagttgtgagacggggtagccacccacagaaatgcagtagagaggaagaagagaagggctctgagcccagtgtgacttggaggttctggatgtcactttaggacagagcagtggctgtgcgggctcagggggtggctgtgcatctggctgtgatgggctcagctcctcctctgagctctgtcgtgggataggtgcgggggttccaaacagaagacagaaaggcgcagagggaatgagcatggaaaacagcagggattcaacgaatgtcagcaccacggccctagctccttttgactgatttcttttttttttttttctttttccgtataatgtaattttttaaaaatatcattatttaaggatcagatgggctgggcatggtggctcatgcctgtaatcccagcactttgggaggccgaggcgggtggatcacctgaggtcaggagatcgagcccatcctggccgatatggtgaaaccctgtctctactaaaaatacaaaaattagccaggcatggtggcatgtgcctgtaatcccagctactcaggaggttgaggcaggagaattgcttgaacctgagcggcggagattgcagtgagctgagatcataccactgaactccagcctgggcaacagagtgagactccatctcagaagaaaaaaagaatcagatgaacttggccaaggatatgatacatgagcttgatattctttgtgatacaatagtgaggtctaagtgtttgtgtttgtttggttggttgttttatttgtttttgtctgtcacctgggctggagtgcagtagctccgtcatcgttcactgcagcctccaactcctgggctcaagataccatcctgtctcagcctcccgggtagctaagactacaggcatatgctatcgtgcctggctaatgtttaatttttttttttttagaaatggggtctcactatgttgcccaagctggtctcaaactcctggcctcaagtgatcctctcacctcagcctcccacagtactgggattacaggcatgagctaacatgcccggccaatagtgaattcttaagaaacatttttagtgccttccagataagtaaataaagacagcagtgaatcgctttaaaaagatgctcagcactcatccattttataatagaaccaaaatgaaggaatggagctcctcctatttaaaagactctgcatttagctctgaggcaggaacgtggaacttaagctatgtccttccccgacgcccattccagaacactttggctgtggaggtcaagtttgtgtatgtgattagccgtccgaggcagtacgagtacaaactggctttctaaatatatcggttattgatttggggtaagcaagagttctgatagcaagttcagagagtgagggtcctgtattacccaaattatttatttcctgagtttgggatgattagaagaaagagattagatggcagatgttatctcaaaaatatccctaaatctatccagcttctgagtttgtatgtggagatttgggaggtgaggcatggggaatgagcaaaggcccggggagtcaccaggcagcatcagtggcttcctggggacaagtgagggctccggggtgggggagccagagaaagctttcgggaagacaagaaagagcacatcacatttattcattgcctgctgtgtgccacgatccacccgactccatgaggatgcgtgatgggatgtcattttcacgacagccctggaagccccggtgctgctatctccatgtccatagccgaatacagcaaggctctgagacactgacttgctccagtgagtagtggcagagccagcattggaattctgcttagcccactccaaagcagaggtttgggctggcttggaagtgtgaacagagtgcagaattgggaggagttagaagggttacaggagggtgttcttgcatcctgtgtgcatttgtccctttatcatggagtcaccaaaatccatgctctgccacaggagggagcatggcaggagcaacgggggtggggggcttgaggatcaaacatttggtctaggaggtagaccagtcatccacaggagcagcgctgcagggaggtgaggcaggttggggtgagtgcacagaggatgctaccgtctctagtactgcagagccaggagaggggttgatagcactgccctctgcctgcctcatttgggcagtggggctgctgctcccatcggctgcctgctggagctgctttctgcctggttttgggggcactggcgtggcttccaccgagagggttaactcccccagatccgcattttgtgttccctgcagctcacagagacacttaatcaatccttgttgaatgaagtgagtccggcaaaacacaggcctcacgctaagaaccctgctctctgtcctcctttgcacccaaacccatttgtctgggagccaggctgatttgtccagccacctgacacgcacttatggcacaccacgtgtgcccggctcagtgccagacccaggcaggacagtggagaaagaggggtttcaaggagcttgcagtgtggctccaaacccccaaatcatagcaaagtgtgaagtactaaacagtggagtgctgagtataattacagttcaatgccagaggccagtgagaaaacaaatacatcaataagtaagcataatcgcaaataaataaataagtaaacaaatcatttctgcaacacctactgtgtgccagatacaacactggtatttacgtgtcctcataggcaaccccccaccccagcctgagaaacttcgcagatggggaatagcatccttattcaatccttccacccatagatctgagcacctcctgggtgttcttggctcttgggatacagcaggaaaggaggccgactcggtccctgtccttgtggatgttgagtcttgtaaagacagatagtcgtcaaggaaatgtcacccatcatgatgcagaagatgaagggaaggaacagggcacgggggacagcaggcagggccatctgagcagatacttgcagatccataggaacagctgatccttagtgagcttgccccacaccacacacctgactctgctgagtgtctcacctgagtttaagcctcacctcagtttcacgatgcctgtgctattagcccaggtaaggaaactgaggcaaagtatgctgtccaaggttaactgggaggtagaagccaggcagtttgactttggggtccacattcctgatgcccactctgctgcctcctggtacaggagccagtggggctatggtgggtggcgcagggggaggaggcagggaggtcgtgggagaagacacatggttatcacccagatgaggcaaagtaactcctaggatgccaggaacagaggggaaattgtttgttttaacttagcaaaggctgtctaccagaactctggagcaaaggtcatttttatggtcggacttcagaagcatctccattaaagctgggaccaaggccagctgtctcctgtggctgtttttccagttgtggacgctgagtgcagagggtctgagatgtgcctgcggtcagggactgggaagtaccaagaccagaccaggttctggagggctgcagtggaaaagcaggccttgaggtgtgagctggtagagaaacagtgtcacctggtcttaagcaggacggggacctgaaagcaggaatagaatctaatcatggtttccaaaaatggttatcagttttctaaaaagcagaatccttcctttaaaccaagtatgacccaggccgaatgcataaacctgatgggcatggagctcttgttggctgatgggggctgtgtgggcctctggacttcagagacttcagagtcctgggggtccacagggctccatttgaaagccactggtttacagattccattgggagtgaggacagaagactggttttcaggtgatgagggcttcggtttagagtgatagttgagacttttagacatgggtaacagaggttaagagtcctgaggcaccccgagttttctggtctggaaactgaggaggatggagccctcatctatgaagagccgctgcccgccagggaggagaacagagcagtttcctcacttgctcattcggaagtcgaatgaagggtatctgagaggaaccagccagtgactgggttgcagggcgggtccctgaccggctggggcttcaccaagatcccagcattgtctgcacggaagagtttggctgaagtcttagtctcaggcatggcatggggcttggcacaggagacccattgcatgtggagtagctggacggacggacggaaggaaggaaggaagaatgaaggaggggaaggaagaaagggaagggaaaaggaaggagggacgggaggtggaagggagagaagggaagaaggaaggaaagtgggaagggaggaagaagggagagaaggaatgaggggagggagggaggaatgaagaaaaggagggaaggaaggcaagagaaaaggagggaagggaggtggaagggagagaaggaaggagggaaggaagggaggaagaggggagagaaggcagcaaggagcggggagggagggaggaaggaaggtgggtgggcagatggaagcgggcccgaagtgctaacagcagaaggcacctcaggaaaacatgagtcccgttaaaatctccgtcgacgggctgggggtatttttcacttggatgcttgacagggatgtggtcttttgtaaagtgacatgtgaatattgccatttactagtcttgtagcagtgggcctcagttttatcatccttgaaatgggaataatgatgcctcctctcccagagctcgtgtgagttcaaaggggttgcacttgccaagcgcctggcaccgtgtcagccccagtgaatggtaggggtgcggggctggcgggtctctgcctgcagccggccaggaagtggaccttagagaatgctgcaaggctgggtctggcccagtaaagagctccaggaggacggagcgtgagaatcaggcaggaactcattttatacttcggatcagcacaagggcccggggaattagctcttcctgaggacttctctggatcccttggagagcagtgatgtgccgactagagtgcaggggtggctccagtgaggggttggcactgcctccccgaggagccctgagcagaatcttccccctggccaggacgccctgcactccctgccctctgtgcagctcctttctccctgaggatttcaaccgtccaggtgttcaaaggcttctcccaggacaggtccagggtctccttcaagcccctgctcattgcacctaggaagtgattgggtccgacccaagaacagcctccttgctaagctgtctcgggcccacacaggagcccagagctctcagggcaggggagggatttgcccctcttcccagggcttcaccaggaatgcctgagggcaggacagggtggcagggccccggcagtcacggtctcttccacattgcagactgaggcccttcacctcctacaagctgcgcctgaaagccaccaacgacattggggacagtgacttcagttcagagacagaggcggtgaccacgctgcaggatggtgagcaacccggggcccagaccgcgttcctggccgctgcccctggagcccgagatacttaggccacactttcgtcttgagccagaaaggggccaccagggagtggtggaaagcagtagaattccattagtgacagacagctcggagggtttccgcacagcctgtggtcataaatcaaggtttcaagggcttccaaatggaatggaagtttctttgattggcttctaaagcccctactatccattagcatcccagaaattgaataattgatagggtcattaaaaataaatgtcagcgggtagctgggttttaagagattttccccatttttctcattcacgagccactctttgacaacagcgcaggtaagtgatgggaagcgaggtctcctcagagctccaggtggcgttttcagccgctccgtcctacctcggcggcgtcaggcctgaagatggattgttattctgtgtggcccaggcctgtggcgagcccaggaggcagctctatcagccgcgtccagcggtgatcacaggacgggtgggatggaaaagagtggatggtgggtaatagctcagctcccaggctggaaacccagtacttagttcacccagcagcgtttcatcatcattcccgcaacctatccccaaagcactgtcttttccatttaacgctccagtggaagaattttccaataaaccaatttccagctggctcaccctgtgacctcacatctccacttctgctctctcgatgacctggaagtgtggtttctcccacataggcctcccttggcctcagggaccagcagagggtttgagcaaaccattcccggcttctcagcaactcacagaggctgttttgctgcaaaccctgcactcccagcagagcagaacctgcaagagcctccaacaggccccagctgtgctcccaggaaaagcacacttgcccctggaaaagcactggctggcttctgtggctcctgcctctcatccagctcttttctgagcacaaatcctgggagtttattggagctttggggaaagccagtgagaaagagaggagccgtcccgggtatatggggtggtccagggccctagtgagccctgctgggccctgaggagccgggctgagccccaggagctcactgtccaagggtcccacatcgttagattcaaccaactgtggattgaaatgttcagaaaaaaagttaaaaatacaaattaaagatatacagtgtaacaactgtgtatttgtttggagagtgttatgaccttgtacaatttctagattactcatgagagctcctacaattataacattgtaacattgttatgtaacagtattacaaattataacgttgtaggaggactgatgagtaacctagaaatgatttaaagtatgcgggaggatgtgtgcaggttacacctagaaatgatttaaagtattcaggaggatgtgtgcaggttacatgcaaatactgcaccactttattgttagcaaacctggaggcaaaagctacttgtaactggaaaagcctttccggttaatctacttaaagtggggaccaatttcacactaaaccacaagggaaaggctttgcaggaactaaattacaaaacaaaaactatataaatgcattcattttaacgttacctttaacacagttgaggtaatgtttgcaactaagcactaaatcttagaataaagaacaaaaccccacacaagctgatgtcattgtcgtaatctctctgacagattgtgtgaaagcaaagtgcaacagcctcctttgacctccagggcagcatccaaaaggaccatttttgaaaaaaatattgaagggcctcttcagactccagaggcctttcttaccctttgatattcagattgggctttgatgcacctatcttgtcatcgccttccctgggatgtgcagtttctctttgcaatggagttgcattgtatttgtgttgtattgtcttacactatctagagattgacaggcacagactctctccaggggttggggaaccctcggcaagatagggagagtcctctgagtatgtggacggtttactgatgaacagtttctttttatagtgatttctatttccctgcacaacctcacaactcaaggacattgagaactccctgtaatggcaccgctgtatcaccagggctgtcaggaagctggctagagggcccaccattaagctggaaccacaggaggttaagggggttggagggagacccatccctaaaacagaacggggaaggtggaggtgtgactgatgcaggcactgccagggctgaggagggggtgtctggcaggtccagaggaaaatcacagagccggtgaccccgggacccaatcttgggttctaagtggagaggcatctgctagatgcacaagtgtgcctgtgggaagaacatcgtcattccgttcagtgaatatggactggatacagaatgcgtgtcacacttctgctgggcccccgggatcttacagctgggaggcataagagttcagctcaatatgccaagacaggaccacacagatttggagggagcagaggaggcagggaagaggggcacagaagacctcttggatgtggcagatgacaagaagtttagtttggctagagtgcagggcatggccataggcagaggtcaaaccagccttgtccctccagagagcagagcagaaccatggcagactccccttcacttcaccctgctgtcccagccagctgcaacctcaccagaaatcaatctcctttcctgacagccttttagtgtttcaaaccaagtgacctggcatgatcatgtgtcctattcaggaaaagtagctctcacctaggtatcttaaaaaaaagagaaaaagataagttcccctgctctcccagaagacctgagccctgcagggagggtctcgagccagagagctccaggacagcctcactggaggggtggctctcggaatgtccaccacagggagagcccagtctgggtctgtttctcggggccattgttaaggttggctccctcctatcccgaggacaggctttgaaggagaagctctgggaagccccgaggaagggcaggagaaggggacccctggagaaggaaggaggcagggctcaccagcctccccatactcactgagggtggccctgggaagggcggcagaacataacaaccaccctgacccccgctttcctctcctgtgtgtttcagttccaggagagcccccgggatctgtctcagcgacgccacacaccacgtcctctgtcctgatacagtggcaggtaagagcgcggggaatcacgcgcgttttgtcaaatgtgttctcatttccctgcgcattcagccacaacggctgacatggactgcaagctgagccctgagctaagcgtttgagagtagaaccaaggagacacaccctcagactcaaaaacgcgagggggaaatggtgtcaattatcatctcggtgtaatttccaaaacattagaagcaggactgtgatgcacgtagagaatgaacttgactccccttattcaggagggaccggcaggatggggaggccagtctgagagcgttggaggaactgggtatgtcttggcatttcaccgaggacgttggagcaaggcttctgtgtatacacaaattggttatcgccctacaaggcagtaaaactgcaaccgctggagttagcttttctagagaagtcatctgcaaccagacaaaatatctaccggattgtacatattttcccaaagtctgggggtgggtggtggtggtggtggtggttgttgttgttgttattattattattattattattattattattattattattattattttgggacagagtctcactctgtcaccaggctggagtgcagtggcacaatctaggctccctgcaacctctgcctcccgtgttcaagcgattctcctgcctcagcctcccaagtagctgggattacaggcgcatgcccctacacccaactaacttttgtatttttagtagagatggggtttcaccatgttgaccaggctgatcttgaactcctgacctcaggtgatccacccacctcagcctcccaaagtgctgggattacagacatgagccactgtgcccagccaagtctaggcctttaatctccaatgtgcagtgagttaaatgaaggcatattcttccagataatcacacactccttgttgggcctgctcagcaatgctccagtaaggcattgaaggacacgctgccgtctctttcccttagtttcaattttgggcaatgcttactgacaagtacattgatgacaaatataacagagggacaaaactgcccaaggaagggctgcaggccccagggagatcccagctgaagagtggggcggggagctgtgcggaggactcagcccagggcctgtgtagcccggatccggggcagacagatgttgagtttccccagggctagagcttggcctggcagcagacacaacagatggacaggcagggggccaagcacgagggcagagtcaaagtttctggcccacagggaggttcctgaggccagaatgggggctgctgtgccagggagctgggaacatagtgggatggggccagcatggggtgggtacggcatgaggacaggtcagcctgggagtgcctgctgggagctggggtcaggagggcagtctggtgggcacgagattcttccttggggctgaagctgtcctcaaggacaatggcagggtgcccgatgcagcaggtgggaatgatggttcgggaagtcaggagaaaatcaagaggggaacagtggtctagacatggccttggagggcgaggggatgtcccggccacatgccctccgccggtgcaggggaggcaggaaggggtcctgtggaaagtgggggctgcgggaaatggaagggatgctgggaaacacagccaaggccaccagtaggtgtcccagacagagcatctcccagggccctgcagaagggccactccaagggacagtggcttcactttgcagcacggaggatgaggtccaggaccaggctaggacaggaggtgccagagatgcctgctgggccgggagagagacgtgctgagtgagcagcgccagccgcagccttcctgggcatggtcttgaggtgcgtagtgctagagatgccagagaggaacccggtgagcagagccaggctgggctgtgggtggggccagccagggggagcttgggaggggctccgctttcaccctcttgctgtatgatcctatgaaatatgaccatgtttgaggtatgaaagtggcaatttatgtgattcaacctgatatcacttgctactgccacttatctgagggatggagagtaggcgtttaacaagctgggttctgtgaagagtgtgtcatctccttcaagtgtccatggaggtgtgcggggctgcgtctcggctgcctttctcttgctaagggatccagcttctctgggtaggataggaacctttccaggcaatgaaagaatgtcccagtgtctcctggtggaactggaagagcacttctgtggcactcagccctactgagtttaccagagcataggggggccagagtgggaaccacgaaaacagcctgggccccacctctgcccctgggaagccacagcccctgatctgtctgggagccactggaaaagtgacgaaggacccacccgcaacttgccatcgggtgactgtggccctgagaggcccctctgactccaggttcctcctttgtaagaacagaaggtcacaaaggtgagctcaggtctcacacaacatctccagtctttgggggccgctagacccccagacccgagcttcagccctgactcccgtgagggtctccggtgggaggttagagacattcaaaatggaaatgcaaagtcccaagtgctcgtttcccagcctgcaccaacacagtcaatcacaagaacattggcactttgtaccatgctgaatcctaccagaaaattcacattttctttgtagacgtggcggcagcctgccaataccttacctaggtaagctcctttcctataaaggcagtgagcatcagggctgggatgcgtcacctcctccaaacaatggttgtgaaggcatcacttgctgtcagccccagtggacggtgcagggctcgagctccccttggtgctgctggacagctcagggacgtgcctagtgccacctggaggagctgggctggtgtgtgcatcagccgtccccctccagagcccaacagaacaaactaattgcaagaagaccagagcaggaggtggtcaatacaacgtcctgtagaaataaatgcttgtcaactgccaggcaattgaagtataattaaaattatgagtaatttactgcattagaacaaacagaacaaagaaaaagaaactaggtttaaatatagatttgcattccaaataaaatgtttcacctgtaaaccttttgtgttttttgttttgttttgttttgtttttttagtaattactttaaaaatgcaaacacagggccagcactttgggaggctgaggcgggtggatcacctgaggtcaggagttcaagaccagcctggccaacatggtgaaattctgtctctactaaaaatacaaaaattagccgggcgtggtgatgggcgcctgtaatcccagctactcgggaggctcaggcaggagaactgcttaaacccgggaggtggaggttgcagtgagccaagatggcaccattgcactccagcctgggcaacaacagcaaaaccttgtctcaaaacaaacaaacaaacaaacacgggctgtaatttcaaggcttatagacccatttaaatgcctcccttagtagactgtcaggcttgattattcttagtaggacagtcaatccttgcctttcatgggatccagttctgtttgaaagctaaggagtagaactccttctgtcttccagggtggagtgcagtggtacgatctcggctcactgcaacctctgcctcccgagttcaggtgattcttctgcctcagccttctaagtagctgggattacaggcctgcaccaccatacctggctaatttttgtattttcagtagagacaggatttcatcatgttggccaggctggtctcaaacccctgacctcaggtgatccacccaccttggtctcccaaagtgctgggattacaggaatgagccaccatgcccagccttgtgttttcttttaaagacagggtctttccctgtcacccaggttggagtgcagtggcgcaatcatagctcattgtagcctccaactcctgggctcaagcaatcctcccacctcagcctccccagtgtctaggactacaggtgtgcaccacgatgcttggctacttcttcaaaaaatttcatagagatggagtctcactgtatttcccaggctggtcttaaactcctggactcaagcgatcctccttccttgacctcccaaagtgctgggattacaggtatgagccactgcccagcctgtaagtgggttttgagactgttttctagcaaagaaaaaaatcccaagcaattgatcacaccatacgggaggctctcagtgtaaaaggcaccttcccagaggagggttacatctgcctgggcaaaggcagggaggcatcccgccgcttcagaacacatcttggggctgtttctttttctcttcacttgtgccacccacagaggaccaacacctgcatggagtgctgagttccagaggggactgaggcaggccacagaatgtgaagagctttcattaagcgcagtgggctctttaaggcattgataggaagacagcagaaggaacgaaactaactctggccagaggggcacctgaatgcacttggcaggactgccaggcccctgcagtgaaaggctggagaagcgcgtggcccccggcacagcctgaggaaaggctcacgggtgacgtcactggtgtttgatgttgtgtctcacgggtattgcgtgttgagcctcctgtgctctcagaaccatcaggaccaaactccggagagaatccctgttctactctccacaaagcagaaggcacaggatggaaagtgaaagctcagatggtttcactgagcttccggcccgggggaccacggtggccggatcagatttggatttgggcacctgctctgcctgaactcgcaggagacagtggcacgtggttgagcctccctcagcccagctccctgtctctagaactaggagagttaggccctgccctgctgctcccctacctcagcagagagagctgggtgggaggttccacagaggccagcaacggcagagggtccgaggtcaccgttcaggcagctggaaggagagaggctttccctgcaggtcctgcctcctcctacccccaggccttccctccactcaactctgtggctccaaggtgcccaccctcctgggtcttccccagaccattgacttcttcctgcctcccctacctggtgataaaacccaggcacactcctaccaggtcatttgcatttaaacaggctcttttgctgtggcacgcctgtaatcccagcactttggtaggctgaggcgggcagatcacgaggtcgagattgagaccatcgtggccaacatggtgaaaccccgtctctaccaaaaatacaaaaattagccgggcgtggtggcgggcacctatagtcccagctactcaggctgaggtaggagaattgcttgaacccgagaggctacagtgagcaacccaggaggttgcagtgagccaagatcacaccactgcactccagcctggcgacagagcaagactccgtcttgaaaaaaacaaaaacaacaacagcaacaaaaaaacgggcttttgaaaaatgaagaacctccaggaggctgctggcgaatttctgaggcgtggcaggcacagggaaggtgttttgaggcaggactcccagttcccttcaagcttctctccacacagatggccaagccagggtgcagtgacacacagatgaggtcatgttgaactccggcaagtcccactccaccccagggctctgactgagcatccgccatggctgaggcctggcccaggtgctctgggcatttaaacatgaacaagacccgaacatggcctgcccctgggcatatgcagagtcagagacatgcgaagggctggggacacgggtctgtggtgcaaagcgaaccttttgtttccagtcatataatactctggaggccatctggccagacttctgcctgtcttgggcacagggttgagcctgggagtttgagcagtcagcccaagcttgtactgcaaggtggctgcaaggccacgacccaaatctagagcctgaccttgacctcatgggttccatggagccgccctgctgatgcctccgagcacctccggagttggagagcctctttcacagattacagacaggttaatcccaaagtccaggaatggaaaatatggttgaacccagttcagaaccctgtgcaggcaggcccgggcatctctgtgaagccaccggaccctttgtaagtgacgctcccactgggaagatgacacctgctagcagagtggcctctgccagctgctgccttcaaggaagccaccctctgggggcacggccgcctggaccccctccccaggcctggaagactcctgccaggagcggatgcattttgactcttcagtgatttctggtgcaaacagcatcagttagcctgttggccaaatgtggccccagcccggtggctgacggacactgtgtctgttgggcaaggcggattggccatttcttatagctctaaatcatctcattcgcctaggctagaaatatctgtgagtccaggatcagtaatcttcggccccttcccctccatcttccagccccagaggctgggaaaccacacttgggcccagggagaacatttttattttcccaacctcctaacttcctgcttagttgatagttttggtgaattgaatccagccttcgtcacgccacctgagcttccctcctcccccagaagtaaattgcactctctgtaatcctgtcttgtctgtgcatctgcagagctggctgaaggcctctgcagtcttccttctgaggtaccagttcctcgagctgctgcaggtctattctggggcgagagggaggctttgaaggtgacctcagggcgaggttgcttggctggtacttacagagcccctgctgtaagcttttgatctgtctgctcgcctcttcgtcatgctgatagtcagtccagagcccagaaatggaagctgaggtctctcatcttcactgcccagactccagccactcccaccccaccaccagtgtgaacagcaaggacaggactcccagcaggaccgcctgggaccatctgggtggaccaggagccttgggcaaaacaatccggctctctgggtgcgcaggcatgtgctgggtgagagccattagcggggacctgttgctgtgtggttgtcaggggcccaggagaggaaagtcagaagcccccagggtcttggaagtcactgccatctctcattcagcaaagggctcctgtcagtgcatttttgcaagactggttgttaccgggagtagcagtaacccaggaatccaccaagcccatccatggctccggtggattggaggaagctccgttctggccagtctccttctggggagcccacccaagtggggaatgacccggcacttgggctagtcctggctcaggcactgggaactgtacctgtagcctggctgctgctcctagacccacccagacctgcccctgcccttcatgcccctcgctcccgtctagtggggctacaccaggcactgtgcccgccttgcagagggccagcccttctcccctcatcaaaagccgcctcctcctccaagggcagctcaaacgccattccctgcagttatcctccagttcttcctggcagtgagctcgccgtctctgaggcttcagagccgccttcctcactcagtctctggcacccggtgcactatagctcaggagatctcctagatgcaatgagacggcaaggctggaatatattccccaaggggcggagctcagtgtttgcgtgcattcctccagtaacatgccctgagctcttggtgagtcagtgtgaggagacaggtgcagcttttcaaggagccacagcaccaggccttcctggtggctctggcactgccctccctccctgcgggagggcccctgggcacagagctctcctgcctcccttagagccacctctttgcagtggcccgagtcacacaggacagatgcgctgtattctttagggtcagcagaatgaccatggaaagcaaacggccatggagaacacttccttggggctcagtacagaaaccactctgtctcctctttctgaaatccagatggcctgcggagaattgcctctcttcagtctcacataccgacttttccaacttttccatccattgtatttcttctaagaaggttaagtaaaccttctatttcattgtggctaacagttgtgtttgaagaaggatgccttacagaataagggttttaatttcagtctcagctgtggcccatgagataaccagggctagagtttgaaagagcagactgcaggatcacctaagcccagtagttcgagaccagcctgggcaacatggtgagacgtcatctctacagaaaatttaaaaattagcctggtgtggtggtgcaggtctgtagtcccagctactcgggaggctgaggcaggaggatcgcttgagcccaggaggtcgaggctgcagtgagctctgatcgcacccctgcactccagcctgggtgacagggtgagatcctgtctcaaaaaaaaagaacagaacagactacctggaacccccttgtgtggtgatgtgagtggatgtgcaagtgtgtgtgtgttatgcacacacaggatttccaccacgcccccacatctctggtggtgctttcatcacgacactgtcgggagccagattgcagttgcatataatactgaccggtgcccactcctagcacaagggactaatttttaaagactaagagtaaaacaactgaaaacctaaaagctgctctgaatgtgattctatagactccacagggaggaaaccgaacatgaaccccatcaacacccccagtttttaggagactgtctgacatgcccagccctaagggatggggtgcagagcaggactggcggcccggcatgggggagctggagaaagagcaaatgagcagcccaggacacctgtgagtgactgttgccggcgtcccaaacactgctttgtcgtcaaaatcatagaaaaggaaaagagcatttagtaaaatcagcaggcactgtagcctcccctacctgttcccctatccagcctcgactgtgcctgtaattctcactccttccttttctgccagctttcagcttcccaaactcatagctccctggtcaggtttggattttattgttttcctggcaagttgagtagtgctgggaactccttgagccggtgaaggggtgcctgctggagaaaggggtcagtggccacagggtgtggacggatggggtggccacgtgccccagggaccctgccgtgccttgctgatcgtctgccgccgcctcgggtacaccgcaccctggagagaccctcatctgtgctggctcactttctgctttgtttctctagctctattactggaggcgctttgaaaagcttttccatctgtagattgtcccgatggaaggcaagcagcgccggggagggagcgggtatccagagaaaacctgggatgcccagttacatctgaattccagaagaatcattttcagattctgatttagctgggtgtcttgtttttttatagctttaaaaaaagcaaaaaaatcaagagagcctcatttgacattgaagtcccgggctctggttcggcggttctggcctggtagctgagcatgctccagccccgtgaaggcggccagccagggccagagtagagaggctggagcagagccggcaccaaggtcccctcatccactggtggtggccagtgaagggtaaagagagaaaaggaaaagccagcagaaaaaaagtccctcccagataatagcccaactccaccgtccatttgagaatttggagctagatgccgggcagtgccatttccccatctctggtctgtggtgggcagcgggagtcctcggacctggggctgcaagcccgcaggatggatacgtgacccttgtaactttctgcaaaattgaagagggctgtggggcattgacaagcacaccgtggggggaacacaggggactcagacgcgcccccacccccagacgacagctctctcagcccctgggtttgctcactggggtccgacacccctgggccaggagcggagctgtgtccaggctggagtagtgtctaagggtgtgggtttgcagggcctctaagacacggatcgcaaagacccagcaaggccactcagttgttcccgttatgcttttccgcgtctgaggggggattatatcccgtcgtgctgttcctgaattgggagcatcacaggggtgtcagaaagtcctcagagagggacagctgctggcagccctgcatggcagtggcctgggggctgcttgagctaatgtggtagcaggcctcattttggaaaacctcctgagtctgccgggtacacacggtgcccctctggcatgtgcgtgtcgcatgctgcatgcgtgagtgttgaacgcgtgagtgttgttcctcgttgctaccacagtgcaagcccccctcactatccaagccattctgtcggagagcctggggagcaaagaacaccgcttcctccacgtttgggttttgcctcgtgagtagcaagagtccaaagaaaaagcgatttctctaaacatccaacccctcctggtgcctgggttcagatagtgaggaccagagagagtttggattgcaaggatgtgttatttaccgggggcagcaaaacaagttactacgcattaggtggttggaaagggcagagccttattctctcacagctctgggggccaaaagtccaaactcaaggtgtcggcagggtcctgctgcctctgagggctccagggaggatccttcctgcctcttccagcttccggtggccgatgacaactcttggcgtttttcacttatggacgcgttactccagtctctgtccctgtcttcatcgggtgttccccctgtgtgtcctgtgtccaaacttccctcttctcataatttccctccactcatcaaattaggaccctcccctaatccagtatgaccttgtcaaaaccaattgcacgtgcaaagaccctgtttccaaataaggtcaggttcacaggcaacagggcttagacttgagcgtgtcttttagggggacacagttcaacccacagcaaaggggctctcgtgcagcaaagctgtggctccgcccagggagcaggatggtgctgcggtgtgggtgcctcacagtgagcccgacaccggaagttctgtgcacatccgtcctctgacgaggcttcgtggcctcgtcttcagccatcttctggtcacagcttagaaggttcctgttccttatccctcatctgagtatcccaagaagagaccagatgctcggaggctcagcacccagatgagtgcagaagtcactgaggctttccagggcatccgcctggagtgggaggacccttctcagtctcagatttgtctcctgcgtggaaacatcctccccaaatgtacttataaacagaaaccgactgaaggaaaaggcaagccttgcgctgggtctcgagtggtgaacagccacatcctaaagtggacaggtcttgaggtctcataaccctgtgtttagattccagcaagacctgaaactccacttccttatctgcctgtgctccctattccatgggagtctaatgtgtgtctaatgagcgcctagccatggcttggtaagaactgcagggtgagagctggatggcaagggtgtattgtttgcctggggcagctgaagcagatcaccggaccgcaagatgataggccaggccagccatcatgcgaggggccatggggattccagcctgaggactgagtccggcacagtggggtggcctggcatggggaggcatcagtgaggggtacagtacggcagccacagcctggatggccaggggagtgagggagggtggggtcagctggtgggtgcttcagagcaggccgcctctcgaggttccaccctgctctgggctcaccacacagcacccagcctcctcgccgtctgtgtctgtccccagcctcctgccccagcctgggggctcatttgaggatttgagctggacaggggtcaaaatgctgatgtccccacacacatgcacatgaaaactgggattctgagagtatctccacagcttggtgctgtgccctgggagctgcctgggttcgtcttgatgaatctgacacctgtcgctggaacccacgactttcttctgtgcagctggctagttaaacaggggtggaggtgagccctgctgcaggccagctgggttgactcccatggtgtggctgagtcggtgtgatgtctttgcagcctccgagggacgaaagcctgaatggccttcttcagggatacaggatctactacagggagctggagtatgaagccgggtcaggcactgaggccaagacgctcaaaaaccctatagctttacatgctgagctcacaggtgagactgtcccctctgtcctggtacagggagggaggttcccaggggacccttggtatctgctcagtgcacatcatggtgggaaacgctgtggaagaggctgagagaagaggcagccctgccctcaggaacagggagcaggcgggtttacccaccaggggcacacagggtgcaggtgtgcggcaggtgggtgcagctgcggaggcagaggggccttgtctaccacagactgtgttaaggggagagcagttgccaggcctccagtgactgcactctaccggcgtcagtggggaagggctttgggacctgagatggaggcagggggccagtaggaacctgttgcaaaacccaagtccagggacaggccccgcctgtctgtaccagacagcctcagcgtggagcccatggtgctcacccccgggctgattttggctctgcctgcactgcgccatgatcgttgctctgacgagggcccagctgccttcaagacagcttctagaaccctggagagggacggctgccctgcccgttcccacccctcctctgttggatggaggttagagggggttcatttcctggcacccaccaaacggtgtcacaaaaatactctttgccccttgacatcctcgtgccggggacagagtgaagaagcagctccagaacacgccgtgtggacggtgccctcccgctttctgccatccctgtggcaccagggctgcctacctcacgcgccaatgccagccgcggggccttccacgcacccagtgcgcggacggcagcagctcctatgctcctatgctcacacagcttgaccccagtacagcgccaggcatgatgttgatgaatgttgaagacgggaaattgcagcactggtgtctgcactgttggcacaccccaaaggtggcccttgctgaccaccagacagttggcatctccctgggctctgtcgcaaaatcaaaacagcacagtagaagggccccgggatgcggctgggcttacgcacctggtcgcgcagctctccctgaggtggtttgctcggctcctccagccggggctccctgcgtgagcatgagtcagctgcacctgccccggggtgaccgggagaaaaggtgtcctgccactcagtgctaagttgtgccaaaaactagcatgtttcactgaatcagagtggtaagcacaccccgcctgtccgggactggggtgccttgttgtttacgaggaggtgcggcagcccccgcaactgggagctggtggaaagcttgggcggtagcggggtctttattgccccgggaggcgcagcgtgggaagtggctggcatcccagtaaggcacctgtctcccttgttcctgccgcacatcacctgcgatggccgtgtccctgcgtgctaaccacctttctgctttgcttaccccaatagcccaaagcagcttcaagacggtgaacagcagctccacatcgacgatgtgtgaactaacacgtaagtgcgctctcagcgggaggcccatgccgcgaggcgcacacactgtgcccagagccagctggtctctcagtgcaagggaaaaccagcctggattaatggctccagttctggaatcgcctctcaaacgctgcgtctccacataccaaaccaccagggagataggaaaagaagcttctagaaacagaggctggggaaatttactaatatctggtcttcaagtttgggacagagaggaaagccagatagaacaagatctctgatctctccaacttccttcttcctttttttttttttaaagaaacactcttttttcttttcttttctttacttttttttttttttagagacagagtctcactctgttgccgaggctggagtgcagtggcacgatcacagctcactgcagccttgaactcctggctcaagtgatccccctgcctcagccccccaagtagctgggactataggctcatgcaaccatgcctggctaattgtgttttgttgttgttttttaagagacgggttcttgctatgttgtacaggccggtcttgaatgcctggactcaaacgatcctcttgtctcagcctcccaagatgctagggctataggcgtgagccactgcacccagcctttctttttttattgtggtaaaatacatataacagaaaatggaccttcttaaccatttttaggtgtacagttcagtggcattaagcacattcacactgttatgcagccgtcaccatcattctccagaactttctcatcttcccaaactgaaactctgtccccattaaatactaattcgttatacccctccccaccagcatccacattcaactttctgtctcgacggatttgacgactctggggacctcatagaaggggaatcatgtagtatttgtctttttgtggctggcttgtttcatgagcttaacgtcttcaaggtccaagcacgtgagagcaggcatcagaatctgagtcaagactgaataatatcccatcgaatgaaagaccacgttttgtttctccactcagcctcccttcaccctttcaataaaccacgttgtttctcctttgattcccagctagggaggagtttcaaaatccaactcaagggctagacgtggagccataatgtgatcgacttcaacacacagaacttggctggtttgggaagtggaccaggcaggagggaggggctggccctccccgagcctatgttgtgttcaggcattctgtaggggtgggagtgatttgcagggcagcacagctccaacatgttgagatactgactccatagcatgggtggaccctgtaagcatctctttgaaggcagccgtccaaggacgggcgcctgagtcacggaagctttgctgggctggtagctggcaggaggcacaatttgcaggcccaagcacaccaccatccacaccagcacacaggtgccaggcacacacatgggacctcggaaaagccaagccacccacagagcagtgttaaccagtgggagaaccttccagaatgttttggcttaaaggtcaattattctcaccctgtcacttagtgcggagctggtgcttggccccctgccctaaggagttctctgtgtacagcagcccacgcccgttctttcccaggacacggccgctaaggtctcagaggcctttggttaccagcgtccttctacattctattttcaatgccacagtcttactctatctgttcataatttcaaggagagattctgaaccaaaaggcaggcccaggttatgttatgtattctaactcaggggtctccaaccactttgacaccaggggtgggttttgtgggagacaatttttccatagaccaggtggtaggggatggttttgggaggattcaagtgcatcccatttattgtgtactttatttccattattagtacatcataatatagaatagagtgaaataattctacaactcaccatcacgtagaatcagtgggagccctgagcttgttttcctgcaactagacggtcccatcttggggggaggggagacagcgacagatcatcaggcattagattctcataagagtgcaaaccctattgggaacagcacgtgcaagagagccaggttgtgcaaggcataaggagcacgcaacctagatccctcgcacgcgcagttcccaatagggtttgcacttctgtgagagtctaagctgatctgacaggaggcagaactcaggcagtaatgcgagggatggggagcaactgtcaataccagtgaagctttgctcactcacccgctactcacctcctgctttgcgacctggttcctaacaggctatggctagtggcccaggggttggggacccctgttctaaatcctttactttagaggagggagctccgtgctgcctcttacctgaacacaggataggatgggtacgtcttttgcttaatggtggtgggtgcttagttaataggagagaaggagggtgccccggtcacagtggatgcaggtatttcacagatttctaacaatcccgcctcctctccttggagggtgctccttgcttcattgtggttcatagggggaactttggagaaagagaaggtggtcctggtggaagctgatccatatttccttcaaccctgcagatttaaagaagtaccggcgctatgaagtaataatgaccgcctataacatcatcggcgagagcccagccagcgcgcccgtggaggtctttgtcggcgaggctggtaagctccgtgcacccccaaccccactgccagagagggccacagtggtggggacagccaggcacgctgcggccaagcccctcaggtgtccagcagcgttctttctccttgaacacattgctgtcggggctgaggtctccacgccactggcagggaaagatgggctcagctgagagctggaatttcctgacagcttcagtgaatggtcaagtcttgcttttgagacctaaagggtttgttcgatacctggggccatcatatttactgtggctttgctctacgaaagtggtattaagtcagtggtgatgtaggtgtgtgggaaatggaacctcgttatctggaggggcagatgtttgtatctgcatgggtccttcagtgggcttcggcagtggcctggtgacagcccattctctaggtctgggagagccatgtgggccattgtctccaccccttttagataagatgtgactgttgggtctgattcaagggaccttgccttctgtggggctcacagtgggaagcaacgtctatttttagatcagatcctgtccctatccctctccgggcccagcgtgccgcaggtaatgagagcaacgccattccttcggccaaggagaccacagaacctcaccctcctcgctggctggtgactttaaagagttccctgacttcacatagagcctgatgtttctgctcttttccgctggtgcagatttagaagggtgttgtttcaggcccggaataattagagtgtccctgaggacagaggctcggcctagcaggagctgctgcatagtggggagggtgagatgggggggcaggggcggctcggactgcgggggccagaggagggaaacacatcaggtgaccttttgcaattgggaagggttattgttatgaaccaatcaatagcaccaagggtcaagcccagcggattttttccggaatggtcaagcggtatttgcatacaaatgaggatgcgtggagagaggcatcaagagcatacggtatttctgcctctctttgcacgaaaatatgttcaaaggggtcactcagagccaccgaggtacggctcagctttccctcagggatggacctggctgtagaggagcccattgagggccatggtggggccaccaagggtgctgtcagagaggggtgccagggtgccgtcagtaaagggtgggtgccactgcggacggcggccatggcagattctgtgctctccagttgtattcgggtgactgggccccagttggcccccatggctgggggtgggtcagcctgtggcatcgggggagcacaggaaaggagggccgggaactacagtgtctgaactgcaagcagaaggtgtgggtgtcagagctctgcctgagggtctgcctgcgcctgggcataggacaccaggaaccagggggctcagggcacttgggcaggccctgagaccgaggcagacgtccagagaaaagagcttcagcaagcggtagggaagccaggggtggtgcgggaaactggggagtcgcgccagggccagccaagcggcaacaggactggatgcccagcaaacagctccagctctatgcccagcgcccagctccagctctatgcccagcgcccggctccagctctatgcccagcgcccagctccagctctatgcccagtgcccggctccagctctatgcccagtacccggctctagctctatgccctgtgcctggctccagctctatgcccagtgcccggctccagctctatgcccagcacccggctccagctctatgcccagcgcctggctccagctctatgcccagcgcctggctccagctctatgcccagcgcccagctccagctctatgcccagcacccggctccagctctatgccctgtgcctggctccagctctatgcccagtgcctggctccagctctatgtccagcacccggctccagctctatgcccagcgcccagctccagttctagggtctgcgctgttggtgtcttagttccttctcacactgctgtaaagggacggggtaatttataagaaaagacgtttacttggctcacaattctgcaggctgcgcaggaagcatggtggtctctgcttctggggcggcctcaggaagcttccaatcatggtggaaggcgaagggggagcaggcatcccacacggcacaaacaggagcaagagagcgcaagagggaggtgccacacatttaatgaccagatctcatgagaactaagccattcatgagaaacccacccccacatccccatcccctcccgccaggccccacctgcacgttggggattatagctcaacatgagacttgggcagggacacatccaggccatataagtctgtcatcgtggtaagatgcgtataacatggaaagcattctccgtgtgcagttcagcggcattcaggatggtgagcagccatcaccaacatccatcgctggagctgtctcttcttcccaaacagaaatcccatacctatgaagcaggcccccttttccctcttttcccatcctgggcagcctctcacttactctctgtcactgcaagttcacctctcgatacttggtacaaatggagtcgtgcagtgcttgtcttcctgtgtccagatccttgccctcggcgtgaggtttttgaggttcaaccgggttgtagcagatgtcggaattgccttccttttcatggctgagtaatatcccattgcatgcatttaccgcatctggtgtgtctgctcctccagggatggacactcgggggccttcccccttttagacttgtgagtgtgctgctgtgagtgtgggagagcgaagagcttttcagcagtgcagagctgagacagcccaggtgtggggaggcagttgcagaggctacaggtgagcccggcctctgaggttagcatcacggtgtgatgtggcttctcccttccccactgggcccccatctccctcccctcccaacatgtgcatccctgctccagccctcctttccagaggcctgccctcctgccccactcctcctcaacacacccacaccctccacgtgactcacctctgcccagaggcctgggctctgccacctgcaccctttgcagtcccacagaagggaaaggaaagcctacttgctgtgcccatgccaccaaggccttttccatgcacacacacaaactccacgtggccacactgcactgctcacagagctcgaaggcgggtgctgagagtcagcagagccggttcccacagcatcacacccacccagagtgccctgtgcagcccctccagtttaacttggctgaggcctgaagcaccctttatgcatcttttttttctttttttgagacagcgtcttgctctgtcacccaggctggagtgcaatggcatgatctcagctcactgcaatctccatctcccaggttcaagcaattctcctgcctcagcctcctgagtagctgggattacaggcgcccgccaccacgcccagctaattttttgtacttttagtagagacggggtttcaccgtgttagccaggatggtctcaatctcctgacctcacagtctgctcaccttggcctcccaaagtgccatttaggcttttatcccctgaggagcggctgccactgccccaggacaccctctctgtccccctccctctaggcggggctcagatttcccctctgtgcggtatcctgggtgctttgtgcacagctctgccttccccccagcagcggggctgccttctctctaatgctgctcctccccattagaccaaggctgcttcatcccaaacagctccttgccccaggggtattgccagaggggatcagaatacctttgtcattcgggcaaattgaggttcccaaacttccacagggcaggagagcagctggggaaaccctgcacccagggacgtgtcctggagacagggcctcccagatatgctgagatgaaggcaggtggaatcagtgtctcatagcagggctgcagggaaggctaatcagaagctcctcatcctgagggagaggagggagaaggaacctatggtctctgtccctgtaacagcagataacacagtcaccatctgccgcccaggcactcatgttctaagctggtctttccatggggctccttcctgaggctcctggcagtagggagggagaggcagagctggtgagggtgcacaggctggcagaggctgtgaggccactttagggccctggcagatggggagcagtgccaggagccggggttcacacaagggaatgtaaccgcccagcaggctcctcctgcctgcagcacagacaaaaccagttcactgagcccatggtattgcagtcaaaacagagtttaattagagcccagccacatgggggaactggagttatcactggtcagtctccctgagggctcagaggttagttttttccaggatagtttggtgggcgtgggggctagggagtgggtgctgctgattggctggggatgccatcacggggcgtggaaaacggtcctcatgtgctgagtccacctctgagcggggccacaggaccccctaagccgtgagtcgtgagtcatgagtccagatggggtcagtccattttcagaatgcaaaagtctgaaaagcatctcaaaagatcaattgtagtttctataatagtgatgttatctttagaagcaactgggaaagtcactaattttgtgacctctggtcacatgcctcctgagcagtgagggattacttacccagcttacaggctgggtgcggtggttcatgcctgtcatcccagcactttgggaggctgaggtgggtggatcgcgaagtcaggagttcaagaccagcctggccaacatggtgaaaccccatctctactaaaaatacaaaaaattagctgggcatggtggtgcatgcctgtaaccccagctactcgggaggcggaggcaggagaatcgcttgaaccggaacccgggaggcagaggttgcagtaagccaaaatcgcaccactgcactccagcctgggctacagagcaagactccgtctcaaaaaaaaaaaaaaaaaaagaaagtatgcttatattttagccgagttcaggcttctcccatactcctaatctctcagccttttattagctttacaaaggcagtttccacccccaaacgaggagggggattggctttagggaaggaccattatcagccttgctctaagttaaactaaaaagtaaattcctagacacggcccctgcatccaggtctctgctccaccccacccatcagatgtggcttggctcttgcacacccaaaacaactcacacatctcctgtgccaggcctggcagtgccaaccctgcaagtggacatctcagttgtttggcctcagcacactcctccgggttctgtgtttacactgcagagagttttctggaaggagaaagccagttcgccattccctttctagcctctgcttctcgcagcccaagtacctgcattgtaacaaccctaatctgctgaggagaggcactgctaacgtattgacttagagcaagtaggccttcagaagaggaaattaaattgggccagcttccgtcccctcggctggaagcttcagagcaccacaaactcgtgggcccgaaatgctcaaaggcttttatgaaaactaagactttgctgtggtcccataggtaagcgtgcaggtccaagcgtcggctctactgtttactgcctgtgtgaccacgggcaagtcacttaacccctctgagtctggccttgagaccttgtgctgctgtggggagacctgtgagtgaggagactcaggtactggcttcattgctgccactaaggcaccagtcctgctcataagatgagtgtccagaatgtacctggcccggggtcagcccccagtcagtatttggtgaatgagggggaccctgggtgagtgagtcggtttgtctggcctcatctgtaaaatgatgaaatgttcagaatagatgatctctgggtcccctgaagttcaaatacgtgatacttaaatctgtttaaactcagagaggaaggataatttttagatttttagctgagattgatgcacaagcccaggcactacaaattggtaaaaataatccatcggtaaggactccagtgtgcaggaggtaggacccaacgccaacaagcttaagctgaaagaatcattattaactcctgcactggaagagttgcagagcctgggacagcttcaggcatggctggatccagcgccccagcaagctgctccatgtggcctcttggatccactttcctcctagttggctccttccttggtcaggctcttcatcaaggtggccatacagccctgggcacagagagcttcccttttctgcagtggaagtccactggctgtcttcagcctgcctttagttgcatatctgtccccaaactagttgctgcagccaacgtcctgaggtgcccaaagccagggagatgtcatctctacctggaccacctgggccaactgtgaagcgagagggtccctagaggagatccagtgcgacagtcagaagaaggggactcgggcattcaccaccacagctgtcctgcagtgctgataggcagagtttgactaggtggccagaaatttttctggtggaggtatggacagtgtctatgggttcctcagcaggagagctcttcagatgacccagccagagttctgggcccagctccacattccacagcgttccgggcactgtgggaccacgctccagccttcaagacactcactattcatggatgggccctggtctcaggttaagcctgcactcctgcccagaccccaagcaggcatctcagcccctgcctgtatttccagagcccccaggcttccccctccttgagtatgtgccccctcatccataccaagctgtttccgcctgggatgactgctccctactcccgtccctgggaggacagacagtcctccctcccatgcagccctgcatccacgcgagcccttggatggggcagctgtcttctctttcccgggcaggattagctgtttcttcctctgctccagaacatgccacgtacacagctctttgcatatccacctgaggacaggtctttttctctctgagttccatgagggcagggacccctcttatccccagaacgttagcataaggccagaacatagaaaacattctgaagatgttagaggaagggtgggagggagagaaacacatttagacaggaaggaaggaaagaagggagggagggagggaggaggggaggggaggggagtaacaaacatagcccaggccaccggcccagaagcacaagtgactgagtgacccctgagctctaaggggggatggagcggctccagggcccagggagctcagggagggcctaaagcaaggcttcctgtccagaggtgcccggcccagctctcctgtttgctctgcaactactgtcctttcccaggagctctaaaacagttaaagctttaaaacaaaacgaaacaaaatagcaaagctggcctcacacaccaaacaaagcttgtggttttctgttcatttatgaatccacgctgaccgaaaactgattcagccccagatgtgtcgtggggacactaggggcagtcaagttctacccactttgccctgggggtcctggcacagacaagcatggccgccagcccagctcccaggaactgcaagagcaggacctcctctcctggagcagggccctccgacacccaccccggctgctgggacccctcgtgcacctttgttatccccagggtcgctctttagccagagttagtggcagctgccccaggacagagcctccaaataaaaagaggtgctgtgtccccacataggccgcctccttggagcctgtggcctcgtggttccctcgacccttagctcgtccccggagccggctcgccttccccacctgctgagccctgccactgatggtttaggtcactcggcggtcctgggggcttctggggcctacagctgggaagctgggttggggtgaatcaggaggaagggctgccgtcaatgagtagagccccccgctgctccagcttcctagggagagaccagaagcccccagcccacctcactaagccctcaaatgctgtgagcatgcctgctgtctgtccagtgagtctaggaggtgccttggaatctcctgggcccgtatagacagtgcgggtacaggcatggcccttctttggggaggaaggcgcccctcctagcctcctcctccacgggccttctccagttcttgccctgtgctttggggtctagtagtggccagacctgggattgccacccctggcatctgtagcctccttctgggggctgcaagtagtaggggctccagcatgtctacctaggaggggctcaagagccacactgtggttcggagtggggcttgggacccatcttgactgtgtttgcagtgtgggttgtgtgcatgttgggtgtgttatgtctgtgtgagggactgtgagagaggacaggtgggcttgctgctacatgaggcacgggggccaagtccagggatgaggcagggggcacctgagggagtggggagggctgggtcccatgtgggggtaaacctccatagttaacccacggcattattaccattattttccatcatccaatacatttgcacaagactatgggtccagcaccttgctattagaaatgaagctactctgaacactgttacaaatcttttccaacgtctccaatgcctgccttgggataaaacgctagaagcagaacttctggtccaatgacatgaacatttttcacctttgaaatacttcagctaattgacaccctgcagcggtgaccagatacagggctcaggttgcattcctctttcctcctgcttttaaatctttcctagtttattaggcaagaaggtatctcattattattttcctagatgggcttttaaatgactggtctgtgattaaatgcctgcagagctcatggctattttttgcatgggggtctgttacaaggtaaactgagacacaaaatgttagaagagtttattcgagcagacagcaattcatgaatcaggcagcaccagtccaaaggtggtttggggttctgggaagggaacacaaggggaacgtttttatggtgtgaatgtgggagctggacaaagaaaatacttgataagagtatgttgttgccttcttcagtctcaactgttagaaaattcctagttgtattggttttcatgctgctgataaagacatagccaagactgggtaatttataaagaaaaagaggttgaacggactcccagttccacgtggctggggaaggtgaaaggcacgtcttaaatggtggcaggcaagagagaatgagagccaaccccttataaaatcatcagctcttgtgagacgtattcactaccatgagaacagcatggggaaaaccactcccatgattcaattctctctcgctgggcctcttccgcaacatgtgagaattatgggagctacaattcaaggtgagatttgggtgggggcacagcccaaccatatcactagctgtatatctgcctttagttgcatatctgtcctcaagctagttgctacagccaacgtcctgaggtgccctcagtaagttgttggcggcttctgattggttgggcttaagttttatttttctttaatatgggcatttacaagaaatagcccaggttaagttttgtttaggtttgcagaaccagcaaggtcaaggttgtctccacggcttaatgggctttgctcaggggattctcaagcctggtctccattttattttaatgggtcttagtgttttgtgttgatttcttagagcttcttatatattagggatatcatgtttgatcatgtctatggcaaatactttgtctttaattttattgtgtttaagtggttgtgtgctcaaacctccatatctgaggcatctctccttcccattttgagaccaagtaaatattcacccagatattttttcataattttcatggttttatgttttccattaaactctttcatcaaaaaaaaaaagaaagaaagaaaaaaaaaactctttcatcctcctggaattaattctggagcctggcatgaagtgagcttctaaatggatcatttgtttccagagaagttttttcccccgaaaccatctattgatttttaattgctttgtggtgcgtcttaatcatggtttaaattcttacacacagtcaagtctgtctgaagacattccttcgttccacagacatctttactgttgccctagtacttctaaagctttcatttacatcagtttgttacacatttttttcatgtttaggagggcttgtcttattcctctttgttttctaaaatttctcagccattctatgaattttacaatcattttggcaagttcttaaaaaaaagcaaatgctcctgggattttgatggaaacgtattaaatagtaaagggatttggaaatcctcgccgtcttcctccttttcgtctattcatgcttgctcccgggagctggctgtccctctggcacggtgctgctgggctggcagcgctcctggtgcaggtcctgctgttgcttgtcaagtcattcctggcagttttattgcggcggttgctgtgagcctgggtattgtaatggctcgtccctgctctgcccaccgccaatcgcagctcaaggctgaggctcacatggttactcaggcatgttaaatattagtccagcaaaaagagcaacataggttttccccaaaaagcgagccaggacttgccttttttccacacccaatggggagtggctgcccagctcagatgagagccgagtgtccagcactgtggcctttagccccgcaactttcaccaaaaacagaagacagacagatacccatgctcagcatttaaaatcactcggccggccaggcatggtggctcatgcctgtaatcctagcactttgagaggccaaggcgggtggattacttgaggtcaggagttcgaaaccagcctggtgaaaccccatctctactaaaaatacaaaaattagctggatatcgcttgaacccaggaagcagaggttgtagtgagccgagattgtgccactgcactgcagccatggcaattgagtgagactccgtctcaaaaaataaataaaataaaatcagttggtggctttaggtggtgtttggttgttcctggtgtacatgtggctgtggaagacagaaaagtgtcttgaaaatatctgtttgctgtttttaagaatgaaaaaattgtcgtacaatatgggtcccacctttcttctaagtgctccaagtttttaattacagttggttggaatgagagaaaaaaaaaagcacagcttctagctgtttcagctcccgctagtgacaaataaagccagtcctagtgcctattaagtgaaattaaaaggcttcagtgacgccagtttgaaaacatgtgtttgtagggaagagtgaatggcacctgtttacagggtaattaacgtcgcaaccccgactccacaggctgcactgtctcatcatcgacgttcccagggctccctgggtaattattaacatatcacgcgataatgacattgtgcaaaccacaggccgcccctgtcatttctgcggccacagtctctccaactgatgccggtgggctgtgctgcgtacagggctgtctacacggtcctggatgatggataaacatctgccgaaagcctactgtgctggtcacagatggtcaccatcccctgggtgggaaccgttgctccgtttcacagatgagagtgatgagtcagctttatccggagtccgcagggggctccccgggcgctatcccaccctctgggctccagctcgtgttgtttcagacgttcccttcaggcacaaatgcactaagaagccctcgccaaggagtgcagagtggagagactgtgggatgcaggtgcctccgccgtgggggattctccaatgcgctgcacccggcccacagcaggctgtgcacaggcactgctgactgactgggagcttggcccaccccttccccatgccagggagtatttcagaattcacggcttccttcaggctctctgcagcatacgctatcccgggacagcctcttgccaaagggcgggtgataggagcagcttctcagagagctcccaggatggagctgtggtgcccctaggcagacacagcccccgagggaggatgggcttgacaccagcctcatcaatgctgggccggagggtggagggcggggaggctccttgcccacaggtgcgagcctagccaggcttctctgggcgggggctctcagggaagcctctggggcctgtgtccacccatcctctacacttctgctggggtgacccttgtgaaatgcaaatcccatcccctcactttctgtttccacccttcaggggatccctgttatgtatgcgggaaaaatcaagctcactcctgagactggccccagggactctgaggtcctgccaggccaaccccgcggcggtcacagtgggtgtcctcatggcccccaggccctcccccgccgcagtcacggtgggtgtcctcctggcccccaggccctcccccgccgcggtcacatgggtgtcctcctggcccccaggccagggttccctttcgtgctcaggcttcacacgcacagcccggcagatgcccaggagaccttggtggcgggctggtagtattactcatctgacgtccatcactgtagacaaaggttgtggagcatcgcgcggtgcccgctgctgcatttggaaaggctccctcacctctcaccatcctgagtttcactccttagccagcttctctgggatccctccaggtcgccacgctggcagccagtggaggcctttcttcagcacccacttgctcagcaacttgctggcaccgaagggagcgagagagccctgaggtacgggcctgcccttcagctgctcccccgaagcgtgagccagcccttcagctgctccgccagggagagggaggatcaccggcctgggcctttgcgaccttctctggggttgagtctgcaagggttagggtctcctgtgagtggcagagctcagggtggacagggggctgcaggtgggctctgcaccataggagaagctgggctatccccacagaggagggaagcgccatctccacaggtgtggccgggcagaccacccctcccagggccgcgcgtcacgcacaaaagtggggttcacatccaacccactgttgagagtgcaccagaacagcagatttgaaagggctttgacggcagtttccgaccccacccccaggcctctctcaaaccctcgccctgctcctcctctccagccacactctcttccgagagaactcttcccctctttgcctgtttctctgttgtttaacttctagatagggaaatctcaagcatacacagaaggagacagacaagtgcaggcgcatcacactcctcacagttggccttagtgtgcttcgtagatactgtgtcagttacagatggaaggtttggggcagccctgctgtcagtgccattttcccaacagcacgtgctcactttgcgtctctgtgacagcatcttttttgcagcagattttttgtttgtttctttgtttattgagacggagtctcactctgtcgcccaggctggatagcagtggcactatcttggctcactgcaagctccgcctcccgggttcacaccattctcctgcctcagcctcccaagtagctgggactacaggtgcccgccaccacgcccagctaattccttgtatttttagtagagacagggtttcactgtgttagccaggatggtctcgatctcctgaactcgtgatccacccgcctcggcctcctgaagtgctgggattacaggtgtgagccaccgtgcccagccagtaaagtatattctaattgaagtatgttccgtgttttttcagagaatgctttgcacattgaacagattatggtatcgtagaagcatagcttttatatgcactgggaagtcaaaacatgtacgtgactccctttttcaatgatctggaaccaaacccacaatatctccaagacccgcccgtgtcgagaacactcctgcactcgccaccagctcaaccacaaggcagcacggccagtctggcttcatccaaacatccacctcctcccctcccgtgtgatcctcaagcagctctcagacatcatatatagaggtttacaacatcatatcattttattcacaaatacttttaccatatatccctataataactctttaacatatgtattaggattctctagagggacagaaccaataggctatatataaatatataatatataaaaatatataatatagattatataagatacaaaaatatataatatatattataatatataatatataaaatacaaatgtatatataatataaatatattaaaatatatataatatataaatatattaatatatttatataatatatattaaaatatttatatattgtataaatatattaatatatttatatattaatatatatattgtatattaattgtataaatatacaatatattgtaattaattgtattaattacatataaaatacatataaaattacatataaaaatattaatatatttatacaatatataaatatattaatttatataatatatttatatatattaaaatatttatatatatatatatatatatatataaaggggagtttattaaatattaagttacatgagcacaaggaccaacaataggctgggatattgccactactggggatgaggaagctgttccttctggcaaaaaaggttcattagagtttacaagctcagtgtccccagcttcatcaaggtcctcccacacatccccattccaagttgcagagtcccattctttttcggtccatgccctcactttaatagtagacacctggcaaggctgtgcatgcaccttaacttgcaggtcagccactcacatggtaagagcttgtgtctgtttttccacaatttcagctcttcctctacaggagtgaagactctcactcaaggcaatcttagcagacttgagactcagtatctgcttctgaagctgggagacagaatccctgagttcatcattttctttcatcactttgtgcattgaacttaggagcaaccaaccagcttcattatgtttcttggttctccacacatggtcagaggtattatgtatagagtccctaaactccttgcctctcacgagcggtgaatcaggagcgtcaaatgcatttattttgcataactctctaaacaattcacgccaaggactatcagcattctccatactactagaagtagagtccttagcatttttggatctaatcatattaagcagccaactccggaaaccgcaaaaccaacagaagaactccatcctgaatattctgtctctctagaaccactcctggtaccaaaatctgtattagtcagggttccctagagggacagaactaataggagagagagcgagagagatatatatatgtatacacgtatgtgtatacatgtatagatatatgtatgcacgtatgtgtatacatgtatagatatatgtatgcacgtatgtgtatacatgtatacatatatgtatgcacgtatgtgtatacatgtatagatatatgtatgcacgtatgtgtatacatgtatgtgtatacatgtatacatatatgtatgcacatatgtgtatacatgtatacgtatatacatatatgtatacatgtatatatgtgtgtgtgtatatatatactcccatatatatgggagtttattaagtattaacttacaggatcataaggtcccacaataggctatctgcaagctcgaggagcaagcaaggagatccagtccgagcctcaaaactgaacaacttggagtctgatattcaaaggcaggaagcttccagtatgggagaaggatgtaggctgggaggctaggccagtctcactcatttcacgttttttctgcctgctttatattaagtggcagctgatgagatggtgcacaccacattaagggtgggtctgcttttcccagcccactgagtcaaatgttaatctcttttggcaacaccctcacagacacgcccaggattaatactttgaatccttcaatccaatcaagttgacactcagtattaaccatcacaatgtataactacaaagtcattcttacacctaagaaaattataataattgcttagtgtaatcggttagctagtcagcatttgaattcccctggaattttctgctctgacagcccacagttctatccttctagacttgtcagccctaacccatgccactgaaaccatgatgcaaatcaatgagctgctttagaaaaaaaaatttgtatttttaattgacatataataatcgtatacatttatggagcacaaagtaatgtttaccatgtggaatgattaaatcaggctaattagcatctgcatcacatcacattctatcatatttttgtggtgaaaacatttaaaacctactcttctagcaactctgaaatggtgcaccgtgatttcttatagtcacgcgatgcgctgcttgttgcagagtccagtgggtgctcgcgtccccggtcttgccctggcctttgatttgaggccgactccttgcctggtttccagaacactctgccctggctgctgcagctccgcttctctctggggtttcttggggctcagcttttccccgtccctcccccacgtcactctccatcctcagctgcctctggagccacagctcccaaatgagtcccctcccgcctgggagtctcttggggaacccaggcctgcaattcccactgtctgcctggcatctctgccgggcgcacccacaagttccttgacccaacttgtccaaaattgagtttctgtgtagtagccaagagcaagcacttagaagccagaatgcccaggtctggctcctggctctgtccccataaccctgggtaaattactccacctccctggggctcaatctccttgcctgcagggctgcagagaggaccagatccgcagagggccctggaagcagtgccgcaggagctctgcctggggatgaagccgtcgctgctcctccccagcctctcggcagcagcagccacggtggcaacaagcctgctaacatgtgcccttgggagggtgcctccacccaccccaaaatccatgacagaaaccccagcctcagcccaagtctctccaccacacccacgcattacatattgtcagaggctgcttttgccctaggaaagcagagttgaatagttacagtgaagcccttcagtccctcaaagcttaccacccttcatgtctggacttttactggaagtatcgttatgtccaagcctagagaagcagcgtggaccttagagcaaggcagattcaggtttgaatctagctcattatgggggatgtgacttaacccctcaaggcctcggcttgcttggtcccctggtcactgcaactggtggattccaggcccttgccaacaggtccgcctctgtcactcttcttcctgttgcagccccgccctcgctcagaccaccctctgcagcctgtgaccttgcaggagctcctccgggctgggtccccacaccctgtgcactccctagctacagccaaagccatctctctcatgtacagctttgactgtctcactctctgctttcaaaccttcccagagaaacctctgatctctaaagccattcagtcccctggacgtgcggtgccgtctctcccgggcctttgaacacacagcctcttccacctcagctgctggcccctccctgccccttgctctccacgccgtaactctcctctccactgttcaagtctctgcctggatgcacctggccaggggagccctcctaggcccaggcactgcccggggagccctgctgctcacccccacagtgctctgggctcattcccagcacagagcccaccctgagggctggaattgcctgctgacctgcccgtggcctgctctagaccatgcaccacgtgaggacaagtggctgatgccatcccaggcacacagatcctacctcatgagccagtgcttctcacggtacctagtggagaagcattcggagaggatttatctgatggatgttgactcttggctaacaagggctgcctctctccatcccctgactttttaggacaagaccagagatgctaaggccatagctaggaaagtcaggccctggaatgagaccgtctaggcttgaactccagccttgcttcctgttggagcatgctatttaacttttcatcttattaaacagaaataatgggagtggcctccaacgatctgctgtgcaatccacacgggcaaacatgaaacctcctctcccacctggggttagagcagcgaggagacccaggctggccaggacagagactggtggtactttgcccttgttaagagttcttggggccaggcatggtggctcatgcctgccatcccagcactttgggaggccgaggtgggaggattgcttgggctcaggatttgagaccagcctgagcaatgtagcaagacctcatctctgaaaaaaaaaagaaaaagaaaagaaagaaagaaagaaacaattagatgggtatagtgatgtatgcctttagttccagctacttgggaggctgaggtgggaggatcgcttgagcccagaaggttgaggctgcagtgagctgtgatggtgccactgcactccagtctgggaaacagagcaagaccccatctcagaaaaaaaaagttatttgaaaacattcttccacaaggagaaaaagaatggatgcttcgcggtcaaggcctaatagccagccgggctgggctcgtgtgaggctgtaaaaccccatccgcagcttctgtgatggtgtacaggggagcggaatgcctggtgctggcgtcaggctcactgtcctgcagctctttgctggcctggcctgttctccaccctcgtttgctcctgggtcttgtaaacagtgttcctttgaccttcccctcgaggaccagagatcacttgctgtctggcgcaggcgctcctgaccttcagatgtgggaggactgtaagaatctcagggagacccccacccactgcttgcggtggtctcctttgtcatagacgacagatgcttgccacacgcaagcagaggcagggcttaaaggttactctcatttctcaggtgagaaaaagcaaagtgcagatggtttcggagggtcctccaggaatgctcagctcatccgtgggaccaggacgcacaggcctgcccactgcatctaaggcagcgaggccctgtggaatcaaatcagcactgagacagagggctgcaggacgtggtcactgagggcgtgaagccagcctgtgccctcctggcctcacttgccccgtagggcctctcatgtcacgtcacctgcctctgtggaaatgtcctgtagctcctgtttcctgcagggtgtcacagaagcgccaccttctgctagcggcccaaacccatcacacacccccctcatttgcccctcacagagtggtcagaacctactgccagttcccactgcacccctgacagctgtagggttaaaggatggggacaaagtcacaagggtgttggctgggacacctgggccaggtgccttgaattctgccccagggctctttgcacttgacgcaccagctcccagtcaaggcctctgctctcattgcagccctcctgcacttccttcctctgcctcggagcaggatctgcaaacagctcagcggccaagcctagcccattacctgttcttgtaaataaagttttattggaacaccgccacacccgtgcatgttgttggaggctgcttttgccatagaaggtggagttgaatagttgcaacaaagcccttacatccctcaaagcttaacatccttactatctgggcctttacctaaagttgtgcgactcccaccttagagaagcagcttggaccttagggttaggcagatccaagttcatatcgagctcattctgaggcctctgacttaacccctcgaagcctcagctttctttttctttcttttttctttgcttttttttttttttcctttgagacagagtcttgctttgtcgcccaggctggagtgcagtggcgtgatctcggctcactgcaacctccgcctccctggttcctgccattctcctgcctcagcctccagagtagctgaaattacaggcacgcaccaccacgcctggctaatttttgtgtttttagtagagacgggggtttcaccatgttggccaggcttgtcttgacctcctgacttcaggtgatccaccctcctcggcctcccaaagtgctgggattacaggtgtgagccagcgtacccggcctcagttttctaaaaggagaatacagtctttctccaacaggttgaattttgtgtgtacaaactgcatataatgcagttaatgagttaggggctgtggattgcaccatggaggaacaccaccgcttgtgatgctgtcatgatctgtgaggacccggatcttcctgtgatggggactcactgtacgggccaggaagcacacacagtccgcaagccgcagagccggttggctcaagcgtcttttaactttgtttatcataacagtgggtgatgatggctattgagctgataagaaggtggaagcactatttcctgatgatgggaagcaaagatcattactggacgaaatcaaacgccagaattgtctagcagtattgaagtttcagagctaacctttaaaatggaaatatctgtaggacaaatatgtttgttatcgtgagtctgaagctctctggcctcatcctccttttcctatggaaacaactgcttttaaaacagtctttaaagctactcggtttgttagaattgcagctgccatgtcacagcagagcagactaaggccatcccctggggctatggaaggagagtgtcccctgtcccagctgccacacctgtgctgctctcagcccctcacctggagtgctctgcctttctctccacacatccctgtgctcagtcagaacttagagcacacagcaactcctcctcttctgtgttcttgaggcacctgtactcagcgaaccactcaaattaacccatgcacagttctagaattctgtcatcctcactgacacacctgccaataaaaaccccatctctactaaaaatacaaaaattagccgggtgtggtggcgggcacctgtaatcccagctactcaggaggctgaggcaggagaatagcttgaacccaggaggcagaggttgcagtgagccgagactgtgccattgcacttcagcctctgtgacagagtgatactccatccccccaccccacaaaaaaaggccaggagcatctcttagatttcctctgcgtacctgtagtgccccacccagagccaggtctgggtgtgtgtaaagacatgtggaccctgacaatggattatcacctgtacacccacaccatgaaatccaacattcatggcaagggctgcaccaaactccaggcggtcttggagacttcaaaatgtgcagaggcttggctgaggccggcaccttcctagaggagctggagctacagctgggatgtatcagtcagctgttaccacatagcaaatgatcccagtatagcaacctaaaacaacacacatctcctaccttggtttctgtgggccagaaatctgggaataacttaggtaggtcctctgcctcagggtctctgggacagtgtcaaccaggcctgtggtcttctctgaaagttcgaccggggaaggatgcatttccaagctcacccatgcagttgctagtgggattccattgttcgtggacttttggacttgagttccttgccatgaagggcctctccatggggcctctcacaacatggcagctggcttccttagcatgggctggccagaccacaagagcaggtgagcaggagagatggcacaggctcttgttgctgagtcacagcagtgccacattctagtccttagaagcaagccatgtattcagcccacattcaagggaaggagattctcagggcataagtaacaggaagtggatctgcaaacagctcaggggccaaatccagcccattacctgttcttgtaaataaagttttattggaacattgccatgcccatgcattacagattgttggaggctgcttttaccataggaaggcagagttgagtagttacaataaagtccttacgtccctcagctcatgtagggacctgaagctcctggtgggcagggcagatggcactcagacatctggggtgcactgggcaccatgtcctttgttcctagggctatgcacttgcccagacacggggctctgcatttcctgggttgcttgctcaggctctgctgctggctttcttgcacttctgccttgagtcattgctgtctatctccaactctcacttgtccccacctgagtagaagcagggtgatccctttaaacctcctgattcattgagaaggcctcccgagctgcagagtcacccagaatggagcctgtctccaggtccccctgctcaggggagcagattgcgagcaagatttgccaagaaggtaaatgagatcagagaattctatttcccatagttccttaggaaatcagaaagagaatctcaccagtttgctttgatgtcattaaagcaaactgaggaatatacaatttttaaaaaatcatataaagaaaattatttcattatattaaaacattaacattgattctcaaattatccattaaaaccttgctttacccaaacagtcagtcaatgggctacagaaactgaaagtagaaatctggcatggtctatcctggtccagtactgctctagccacagcagatgcctggcatggcacagggaggctccggtgacaggaggcgcctggcgtggcacagcgtggctctagtgacagcagacacccagcatggcacagggtggctttggcaacaacagatgactggcatggcacagggtggctttggcaacaacagattactggcatggcacagggaggctttggcaacagcagacacccagcatggcatggggtggctttggcaacagctgacgcctagcatggcacagggtggttctggcaagagtggacacctggcacggcacagagtggctctagcagtaggatgaccacctgtctggtgtgaacctaacatgcaccccgtgttcccacccttctactctttctccttccatctctatagtcagcagtgcccttgctccctggcccactgtcacgtctcaaatcttccctgttatttaaggaccagccagatgttctactttccaggaaacatccacatccctagctggacatgctctctgggccccgaccctgtccccacactccgcctggcaccgtgattattgtgatgcgtgtctctctctgatgaaacttgtctttcacatctggtgtccacctgtccctcagcccaaggcctagaccctggttaatattcaggaggattttggcagcgttaggctgggataacaaacaacctccaagggctggtcccaccagtagtgctggtccctcccgctgccgccctccgagtgccagcatcttctcttctgctacctgccattttcatcccaagactctggttgggggagcagcccccgtgtgactggccagcctcagggctgctagaagagaaggttccaggccatgtgactctccagaaagtgagttgtttggtcacgtggggccagaggggaaaatgtgcagtcctccctcagttggagcgaccgccagtcacagggccatgtcgctgtccccagatcaaatggatgaccttccgcctggcggacggtgaatgttttgaatgagtgggcggaggctgaatgaatgagcatcattctccctgcagagttaattcctacagctctgaaacttttccctcactctctgaagcctccactcctccaccaaatgccacgtagaaccgttttgttttgtttttttctcctgagatttgagtcacaccggtgcctgtccagctgcctcaacttgcagcagaggttcctaaaccctgaggtgagggggctgcagcccaggcctgccatgcagggctcaggttcaccttgggtctggtgggacatggagttagaaccatgagctgctggtgctctccacccaccagcaaattaagactaagtcagggcagccactgtgtcccagcggctgcttttgatccagctgaagctcgctggccacttagggacggcgagcacagggaggttgggcgaggcgacagaatgccgtccttgctgccgtttggggcttggctgcagcctccagcccaccccttcccgcagaggcaggaggccacgccataacccggctcaggccccagcgcccagccacgcaaggccatccaagcaaccagccagaattccagaacatttcagaaatgtcaggaattccacgatggctgtcaggtgagggtccctccagaagtcctgaaagcttgtctctcattgcctcagcaagatccctctcccaggccgcagaggccccctggcgagggtacaggacccatcacaccaaggacctgagtcactcagctctgcgatggcatcgtagccttagcgtgagaccccagagaaaaccccagctttgcacctttccctttaaatgccagttgcaggcaatctccctagcagcagacgccagcaattgccggtctaaaatgctttttaaaaataatttcatgtattttttttttaaaaaaaaaaagcttccaagctggtatgtatgtcatccttacaccgcaaatgctaaggtgggaaaacaaaaaacgaacgacaatcagatgctccgtgtctcccaaactgcacacgctttacggagaaggagagttgcaccggggcttgtcaatggcagagccttcctgaaagtcaggttctcctgtcagggtggagacccagcggctttcaggagcaaaaaagaagtctccaaaccgacacgctttgctcagcgttgacatatatttctctcttccctgctggtgtcaacaaaaaatgctttgttgcctgcagtaattttacggtccagaagtgccttgctgtagcattgctggtaggcacggcagtgcggctcagctgcctgagacagggtcatgggcctttgcccagctcgtctccaccccagagaaaggggcatgcgggcccctaatttatgggggttcacctggcgctcacagacccaccagttcctacaggcggatatccaagtccagagctgtcgtgggcgcgctgagttgggccatctttggaaagaaaccctggggctgtcgcggggggagggcgatgtctcaccgactaccagggtaatggccgcgctcaattttgcctttcacattttaattgtacaacagtaattttgcaatggagttgccgatggcaaacatgcaaaagacattaactttatttatgttttggattattaatgtggctgttaaaattcctccagttagttttgattgaattgtttttttgtgtgattctgctgtttaatggggcggtaaataagaatttctgataatgaggctgagcatctgtcacaacaacctggtgtgggctattaacatttccattaacggcagggtgggcagtgataatacggaaaccacacagttagaacaaaataaatagttggtgtcaggctgagtgggtgttaattactattttattctgcgctggggggagagagcagaaagtggggagggggtgatggggaaggggcgagtcctgaggtcagtctctcccaagaaggcctctccagagagccgggtgctgggccatctccctcggacagcgactgttttatcgtctccatcgatggtccgtaaagacactcagtcaaaaggctgcactcctgggccgcagccccggcggcaggcggagaggagtgctcggctggcctctgcctccgggagccaggccccctgcacagctgccctggagctccccagggcccagctcatggacagccgggagagccccagtgggaggagggagtagcagagaataggccgtcaagagaaagtgcgcagcgtggaattcaaagatagtgtgaagctggcatggggcagacaggacggaggcgttctggaacgcaggcgtgtgctcccaactgcctaaatggctgtgtggtgaggtgcggaggtgcggccacacccctaatggcggtgtggtaaggcgcggaggtgcggccgcaacatcctcatgtgtcctttggtttgcgtgtgccatgcagccctgcagacgcagacagcaccccagtgagctcctccccagggggagcgagggggctggaggggaagactggatcctcagaacgtgaagccagagctggcctcagagagcaaagtgcagccatgttctcaaacatcggagcttcctgtccctcttagaggggcaactctgtgtatctggacgaacttcatctagatcagggcttcatagccagggatgcctgaacctgtcatgggaacacagctatcttttctctaatctcaatcagtaatattagtgacaaaaaccacagcagtcaggagtcctgtgactccctcgccgatagagccgcagtgaccctgtcacatcccaggcattgctgggacctcaagttaacatcctcacccaccaatgctttgatctcacagcaaccatcagaccagcccctaagcctggtcaggtattaaccaagaagcacgtggattacgatctcatacctttggtttcaaatactctgctaactgtatctcggtataattatttttctgtgcaattctatatattttattgtatgcatttaagaacatcgtatgggaaggatttgtggtcttccctggcataaaagggctgagagctcttagggggacacagagccacggatcccaggacataactgtctaaggcctcctaagccagggcgacggcccagggaagaatctctcacatggttcccagcggaattagggcatgctcgagccccatgggcatgtgggcgagggtccgggccggctctgaatgaacgtctcagcttctctccgcattgctctttcctcagccccggccatggccccgcagaacgtgcaggtgaccccactcacggccagccagctggaggtcacgtgggacccaccacccccggagagccagaatgggaacatccaaggctacaaggcaaggccctcccgtgcggttgcctcccctggctcgcttgggcacccctcgttcacgtggtcctgcctactgcattgccagcagcagaccccgcaggcgctccacctggagagctggggcccaagcgtcggagcttggctagacctggcctgttaactgtggtcacagctgcttgtgggtgggaggcagcacaggggccaggctcactgcacacctggctgtgcccaccacaaaacaacccaggttgggggcccttgtttgtccactggcttctccccactctggacgcatggcctggctggggaacccttccgtttcctgggcccattctggagcccccagtacattggctgactataaaagaacatggggcgcctggaagagaccaggctccccatcccagctccccccttggtcacagttggacactgagtgagtcccttgattcggtcggtccagggtggggcccgccagtctcattcctcacaaggtcccagatgtgaggtccctgggaaccctgctttgagaaccgccacggtaacatgtgagaagcccattgtcactggagggtctagagatggggagaaaggaaggcagcaggccatgacaggagagcgtcgagtgaggaatcattatgtggggctgggttatccatggggcgggaagcacctctccacgtcccatccctgaggcctggcctccttagagagtacagggcccataagcatccggggtctttgccatgaaaacgcccccatccttctcctaaataaattcccctgtctattctgctgggacccaagtcgatcagtcatcagattctgggggctagcctcccctaatgactattggaccgattaaatgtccatttaaagatggtttttgcaggtgtgttatgaaaattaataccttcctccatggcagggctgttacagtgatgaatgagctaatggagagccccatgagcttggaggcatggcgctatttatgtatgtccaaaatatgttttctaatttccttaatgataaagacactgatcttggatattgatctcaagttagcaaggcctgggcgagcggaagatcttagacggtcaattcagtgagcagaagcccactacatcctgcaggtggaaatgaacgatgctcaccagtcagggcctgcccagcaagagcaaggcgggcgggtgtgcgaggcaggcgtgccagccctggggcgctccaggctgcctccccgaagcctccgtgctgccttttcacatgggcaagccgctctaacagcctggccctggtttagacccacagagccaaggtgggtcttctgattggtgttgtctttgggcagcctggctggcactggtcggaggtagcagtggtttccggccagctgtctagggaagcaattctggcaacctctttaaacctttgtgcttgggcgtcaagttcaactacaagcacataaaagctagacaagaggaaatggcaccccagaggaatgaggccttcccagcagccctgagcccaacatagttctcctgcctgttgtttttgattgctttaatctccaaagtatattgccatattgaggaaaacttagatgtcggctctgaataaaatgtgggaacacatcgtaggagttgggggtttgttgtctccatagctcggagcagggggtggacacggggcggcttcccttctctccagaagatgggggagagggagaggccaaaaatcaaaacaccaacagagctaggtctgcaaggaaaggcacatcatcggcagctgaagggcagcttcccttccgtcctcacaacttatcttcaacagcgctttgtttaacgaggcaatgctcatactctaggtgagcaacaggaaaatgttaaacatcgtctcccaaacaacattagcagccaggggtccccgtccatacacagtagcctcagcttctccctgattcctccaggagggagcctttccaccttcccacccagcacagctcgccccagaactcagctcaccccctcgctttgaccttacactcagtggcccccgcttactggaaggcttccccaggacccaccccaacctcttgctgttcctaacagatttactactgggaggcagacagccagaacgaaacggagaaaatgaaggtcctcttcctccccgagcccgtggtgaggctgaagaacctgaccagccataccaagtacctggtcagcatatcagccttcaacgccgccggagatggacctaagagtgacccccagcaggggcgcacccaccaggccggtaggaggaaggcgggtttcctttgggcaggcctccttggacacgtgttttgagagcgccagctcaggtcccctcacacagtggttcccggcccgcccaggcggaaggcaacaccttttgagtagctgggagtttctggatgggcaggactgggtttggctcatttgttctccctgtgcctggcctcagactggtacacagtggcgctaaataaatgttaggtgggttggagcaatgcatgctttttcccagagccctggagattcagaggggaggaagggctttgagtctgcagcaaggcctcgttcataactgacagcatccattccagttcctccaagaaatggaacttcccatcaggggcgcctgatggcatgtccagatccttgggggtaggctcctcgggcagtaaatccaggccacagcgacgggaattcccctgggtctcagggccacagaccacccctggagactgctcactacacacatgccacgggccagtcccgagggctcagacaggtgctgcgctgctgtggcctcatctccacgcacagggcgcagcgcctgttctcagtcgacccctcttccagcgcatctcagtttcctagcagcctggaggatgctgtgaagctgcttggccttgggctctgaggagctctccaaggccctctgtaggattctggaagtctgagagactgggagagtgaggtctgggaaccgtgggcagagacgcagggctcagggccttccgacattccatgggttcagctgacccacagacaatggactccgggaatcagggccccttggcatcaaactctcatgtgctgaccacaaccaggttgcaaggaccacttcctttggcttcatccagtgcccgcatctgagctggaaggatgtgggcagatctgtaggcagagatgagggtagagccatgttgagcactgccggcctggcaggtcacagctgtgggtcccagagactggagggagggcagagagggaggagggtgggtgccacttcacaggcacttctgagcagcgaggggcaccagggcgaggagagtaggtcccccacctaggctgtctggtaggggcagccccagtacacgcccaccttacacggcgcccgggcagagggggagctgccagcaggctccacatcaccccggccacacacctgaccttcagtagctctagatatttccaccagctccctccccgctccagacccagggggacactcagcctggagagtgtggtgggagatttcacgtgcaggagccaggggtgtcccccaaaacccccaggcctctgagggagaggcgaggaggggtcaagagaggcttcatccatcacagagctccgtctctccggcaaagagcaggactagagcttctggaatcctccagcagttgctagaaaatggagctccctgcgtttcattttctatttccatctattattcatttttatgcctttgccgttttgtctctcaagcccctttgtgtttaaacactgtcattttctccactcttctcaggagggtctgcgtgtctgattgatcctcggaagttctgaggtgatcaataaatcttttcattttatgacattcagacttttactgagttgaaaataacatcgaataacattttttattctatacggaggcacagacatgtatgtatatgatctatgtaggagcccctgtaaaagtcactttgtgttctattctcccagcccctggggcccccagctttctggcgttctcagaaataacctccaccacgctcaacgtgtcctggggcgagcctgcggcggccaacggcatcctgcagggctatcgggtggtgtacgagcccttggcccctgtacaaggtaagacccggggttggggagatgggagcgcgggccacaccagtgcccagccctctgcagtctacacagtgagccgcacctgaccgcttctgtgggccaggagccttctggcgcctgaagtggggggttttggaatctgagctggacggggctggagctgagtgcgaggggagcggggactcgcggggaaaggcctgtgaggaaaagctgagccaagaccagacctctgtgttctgagaccagaacggcactctccctctgaagccgtgtcatatatgcccttgatcctgtctctgtcacactcaagacattcctctcctattcctcccgagatgtttgtcctgtggtcgccgacagagaccacccagggttccacttgaagccacgcctcacaacacaggccttcggctaccctcagcatcctaggagggatgctggcatccccgtgtcttagcaccctggtgctcccctcgctcatccgtcccctcagcggacatctatgaagctcctgttctacatgctggaaaagccaagacatgctccagatgctggaatcgaggacctgggaaagccaggattttgactggcttgtttatcaggtccctggctttcctgcgtccaggcagttcctattccagggcagaggtaacacacaggtaattaaatcagcaaacaacagcccgagcgtgatcagtgctttggaggaaagagaggagggctaacacaagaggcttagggaagagaccggagtgacaagggcccggacacacaagaatcctggggaagatcttccgaagggaggatccgccaatctaggggcccacggtgggcagagcttgggtggtgctggtggctggagcttggtgagtggggtgcaggcactgcaggccacagcacacggggctatggcatatcccactggagagtgacacaggagcaggaggacctgacctccccaagaccaggatccctcgggcccaatcccccgtctcagtgtcacgatggaaagaagctatcgttcatctccacacttcctagatcaaccggaaacagcttccatagaagagcagggaaggtgttgccaacacagaggactttgaaagaggaaatgtcaggggcttgacagtgagtgacaggtgaaaacggaaggtggaatgcagatggctcggaggagaacgggtggcagagattctgtagaccagggagtgaggaggccggccggggctgtggcatcatcctacaggagagcggcgagaaggggaagggtgcgggggcaggggaggagggctcagatcaggggtgtgtattgaaggtggagctggtggggtactggcgtgaagtggaggaatgggggttgcgggcaggtggctctgccctgctgtgcatgtggctgctgctctgcacctgctgggtcagtgcacaccctgctcaggtatttgttcttgtttttgtttctgttttttttgagacggagtcttgctctgtctcccaggctgaagtgcagtggcacgatttctgctcactgcaagctccgcctcccgggttcgcaccattctcctgcctcagcctcccgagtagctgggactacaggcgcccaccaccacgcccagctaactttttgtatttttagtagagacagggtttcaccatgttagccaggatggtctcgatctcctaacctcgtgatccacctgcctcggcctcccaaagtgctgggattacaggcgtgagccaccgtgcccgacccctgcttaggtgttattccagtgccttctgtgtccctctctcctgccatccagacaccaatgtgtccaccaaagattccggtctgggaggcacgtctttcccaccacactggggtgaaatacaagtccagctgtctctgccttatggtccagggcaagtttccccctgtaatatacacagacagactgtaaaaattatagattatttaatgtctgcgaggaaaaaatacaacgagcacatcaaagaatatcggcgctccatttaaagccgtgataaaagtttcctttaaaaataagcacatttagatgaaacggagttgatttgatgaagaaaatttaagcactagttttttatttcactgaatctcagatgccattcactgtaagattcatcattattttatgaagtgctcagaaagaaaaaatgctcccaataaaccagagcccaatacttttgtatcatcaattctgagctgcatcccaaatcggagatgtgaaaatccgagaaagaaaaaaaaaatcacgtcttagacaatcgatggactttggtaaataacagtagaggtgagatgtgggcatggtttttgaaccagcagagagggcatgggagggacggggatttagtgtggccacttcgaggggcggccaggatctgttgtgaccttccgagtgcccagcacctgcctgggagccagggggcctggacgaggctgccttcgaggtcccacagcagaggcccagaagcaggcatgccatttgctcttgcttgtcctgcagggagaaacagtagagaattttggagacacacacgggttccatgagcctgtgttacaaatgccttttcaagggtcataaccaacgaggaccatttaaatgagaattgactgtgaaagcttcatagttctgattgacctgtgagtccttcctaatcaaaggcagctcaggttttcccattcttcctcaagtaagtgactggttctgctccccagtcttctgtgttaatggatttgcagaatctccgtggaaactccatggtgtgtgcctctgggcttctctcttgggctgctgctcttagtcttgtgagaaagtgcttcatgggctgggcgcaggggcctgtaatcccagcactttgggaggccgaggtgggcggatcacaaggtcaagagatcgagaccatcctggccaacatggtgaaaccccgtttctactgaaaatacaaaaattggctgggtgcagtggctcacacctgtaatcccagcactttgggaggacgaggcaagtggatcacgaggtcaggagttcaagaccagcctggccaagatggtgaaaccccatctctactaaaaatacaaaaaattagctgggcatggtggcacgcacctgtaatcccagctactccagaggctgaggcagaaaattgcttaatcctgggaggcggaggtggcagtgagccgagatcgcgccactgcactccagcttgggcgacagagcaagactccgtctcaaaaaaaaaaaaagaaaacaaaaattagctgggcatggtggcatgtgcctgtagtcccagttactcgggaggctgaggcaggagaatgggttgaacccgggaggtggaggctgcagtgagctgagatcgcaccactgcactccagcctggtgacagagcgagattctgtctcaaaaaaaaaaaaaccagtacttcattccaggcaaggccattccatgggtcattacccagtcagaagtgccgcacaggggcctcgatgtgttgggtcctcttctctctgcagtttcactcccctagaattgtttcttggcttctaccaaaccttccccctagcccagtctcccagacacaagaccctgcacatctggcttcccttgtgttttcagtgttgccgtttcttgttcgtttcatgacagtttttgcatcactgggaaactcaaagcattcggaagatttttagacaatcctttcagcatgtcccgcttacatgggcattctgtgttctcgctatacacaggcaccccccaggtataatcacagtgataggtgatgtttgttgagctcaagtcgggcactgtgctcagcacttaacatccgctatctccaaatcctcagaacggctctaccttgtggctgcagcttttcttctcctcccgcagacagagagattgggctcagagccacaaagacatttgcccaaggcctgcgttttgaaaataatgacgagggttgggatttgaacccaggtgttctgagtccagagccaaggcctaaactgctccatgatgggcagaaagcgtctggagcacttgtgtttctgaaagtaaatgtgaaggtgaacttcagagatggggcttgaggaggattcactaaagcgttttatattctagacaaaccgctggctgcacagccgagtagggggcctgtctctcccctggatggcaaaaggtggagtcactttagtcacaaccgttttcgcctcttttcacaaatagcaagaccgtccgtcaccagccttgtctcttttgtctgttgcgaagggctggttccttcatcctggattttcctggctttgcaaccgaggcaatgtgctctgagattagagcgagaggggagcagcactgtcttgctttgcagctccttccttggctctgcaggctgaggggcggccaggatctcagcagaaaaagctccatcaggcctccccgggtgtcaggaagaacaagccatgcagaccccccacgtttgggcttgctgggggcttgggcacgttccagacttcggattcctgcacatcagtcaagcagcggatccaggtgtggattgcccagcggtgctggtgacatgaggcgtccagcccccacccaatggccttatagagcttcctctagacatgacacctggctctgactaagccatggggcccccgccggggtctttcccgccacaacaccgtcagtctgcaggcaccatcatccgtggtccggctccagccgggatgagcctgagtctggctataggttccagatccctcctggcttctccctcgggcaggactcagcaaccctgccccccagtgccacccaggtggacctcatggctgcctggggaaggccctcctcaccacaaatgccagcagagcctcgggaccctggcgctcgcctgcctcccctgatggtattggccagaaccctggctcgccgagacactaaccccaggcctgtccgacaagccacatcccgtacccacatacgtcaaaagaagaacgtggaccaagagaggatggcagatcagactcactgagtcagcttatatctcatcgggggccagagcactggcatctgatgaagattcccaattggtgggtggtgaaggtggaggtggcagaggcggaggggcctatctctcccttctcctgagtccaggccttgggcggagtccccctacaccgactctgcgctgggccacgggattcgcttcagccagcgggacaatagctgtcatgaggcaagcagcttcaaaagcatttgcacgtgggaggcaccctggtcctcctgctgcccttggaacccaaccaccatgtgaacacacctgggctggcctgtggggtgacagtcacgcacggcccagcatgggagaggggccacctgggccagccaacccccagtgagactcaatgtgtgaccgcagacatgctgagtctagtgcaggccagcccggccaaaggactgccccgcggtacgggagctggtttggtggtggtggttttgagccactcggttttggagtggtttggttcacagccgtgcatgagagaggtacagcaggtgaggagtccatgttgattgtggagcacctattacttgatgcgttcttagacaatagtcagagttggggtcctgactatcggctgggcactcccactcatcccccctgccctgctccactcctcaccgtggtcctatgaggtaagcgctgccaacctcagagcagagggagaaactgaggactctgcagagaccacatgtcctgcccagcctcacacagggagcaagcagtgggcttcagaccactcccatccccgttcctgcattctctcttcctcccagctgactctgcagataccacaaccggccttggcaggaacgtggttcaggaagcactcatcctggcagctgctctctgcctgcaggcatttctgagtgtcttggcctcctgaggctggggaagggaggacgtgaactctctgttgaatgtgggaggatgccgggatagcttgaaaaggacgacaacgccacacgatggagtgtggccaagggcagggtggttgacagaaggcaacgactgggaaaaagcaaagcagcttcgtgcaccccgtggaggttacaccatccagccctcactgccctgcacctccacacccagactggccccgccccacggccgctgctcccactctcacccggaggggctgcactcccgtctgctcctccccgaggcccctaggagacaactgtgcctgcgtgggggactctgaaaaatccagactctaaccctttcactattgcatcaggattcccaacggggaaccacaaaagcggtaactggacctccacatgactttcaatattttgctcatggagtctgtgcgtgtcccagggaaacagttgcaaacgcagtgaaacatcaggcatccttgaagtatattgtgatgacaaaatattttaaaatatggtaaagatagttaaaaagtaaacagtgatctcacctggtaggggatctgtggggtcttctgacctctttccacacctcctcacccagaaccaggtctgtgcctgacatctgcaaactcttggctgggcattgaccagtcgggccaaggcaaatagagggtacagcatttacccggtatgggcagctcctctagtcactccactgtgaacacagtcgtggctcatcctgtgtgctgggcagagcccagggccatccccagccatccccgtcactctagggaacactcctcgaacccctgggacatcacattgtccagagcaccaggccacccggagcaccacaccacccggagcaccaggccacccggagcaccacaccacccggagcaccaggccacccggagcaccacaccacccggagcaccaggccacccggagcaccacaccacccggagcaccaggccacccggagcaccacaccacccggagcaccaggccacccggagcaccacaccacccggagcaccacaccccccggagcaccctgccacccggagcaccaggccacccagagcaccaggccacctggagcaccaggccacccggagaaccacaccacccggagcaccaggccacccggagaaccacactacctggagaaccaggccacccggagcaccaggccacccggagaaccacgccacccggagaaccaggccacccggagcaccaggccacccggagcaccacaccacccggagcaccaggccacccggagcaccaggccactcggagaaccacaccacccggagcaccacaccacccggagcaccaggccacccggagcaccacaccacccggagcaccacaccacccggagcaccacaccacccggagcaccaggccacccggagaaccacaccacccggagcaccacgccacccggagcaccaggccacccggagaaccacaccacccggagcaccaggccacctggagcaccaggccacttgagcactcagccatgtgcttgggaatccgattttatggcagagctatttttacattttttaaaatgtttttaatggtggtggtttatgggattgtaccctgaggctttgtagtgctgggcatggtttaaaaattgattaaataaataaaattctgacacacctgaaatggggagaaggccaggctggctctgcctcctgtgggatagaatttacaaaatctgtacctgggtttgtttttgctccagggagaaggaaggcatttttaacaatgaaaaaaaaagttgctctctagaatcactttacattggacaggacccagtttgtgtgttgatgacagtcactatgtgcacaaactgccatcctcatcacctctctgagcaatggaaggtcagtgctcacacatgccccattcctctacaggaaaacccagttttggagggtcacccaaaagtagccaaaattggccccaggcacggtggctcatgtctgtaattccagcacgttgggaggccgaggtgggcagatcacttgaggtcaggagtttaagaccagccgggccaacatggtgaaactaaaaatacaaaaattagccaggcatggtggcatgcgcctgtaatcccagctactcatgaggctaaggcaggagaatcgcttgaactcaggaggtggaggttgcagtgagctgggatcgcaccactgcactccagcctggatgacagagcgagactccgtctcaaaaaaaaaaagccaaaattgctctgaaataattcggaagaaaataatttagctgaatatatgtttgataaaaggcataatatatgaaaacactgaaccagctagaagatatgttggagatttttaggataagagaaatttgctttgatggctttgaaagatggacccgttttgtagtaggaaggcgctttgttctgttctgaagtggagatgactggggtattccaggtgctgactagcagcgcacgaccctcccgcaccaaggcagccatttcttagggctgacagcaggagggcagggctgggcaggtggactcaggacggtgggtgccactcaccaagggcagctcttctcagggatgctccttggaaaatgagctctgccaatcggtccatcctggaagtaccacaccttgatatcctcctccaagagctgcctggtggagattaatctattgaaagttctgagaagtccagcagttgagaacttatctaactgtttttttttttaatgcatcattttcaaacttgtttaaccaaagaacttgatttttccttctggaaaatgctgcatatgtgtaattttcaatatttattctctcccctaaaatgtgaaatctccattttctatttctaggtaatccaaccagcaagacttttgcatgatcacttgtttataacatcccataggtttgaggacgtttgtctctatgttgccatcgtcctctgaatcgaggcatcaatacttgcagtgaaattaattaattttttaaatcctggcttcagagtccacagatgaagttcttatgactcatttgaggcctgtaggccgcaagttggccaacccaggcaggctgcagcctcctcgtggggtctaactagatggagtatcttcctacatcttgtatacgctccctgtgttaatctgttctcacactgctaataaagacatacttgagactgggtaatttataaaggaaagagatttaatggactcacagttccacatggctggggaggcctcacaatcatagtggaaggcaaaggagaagcaaagtcacatcttacatggtggcaggcaagagagcatgtgcggagaacctcccatttataaaaccatcagatctcatgagacgtattcactaccacgagaacagaatgggagaaacagccctcatgattcaattatctcccccaggccccaccttgacaagtggggattattacaattcaaggtgagatttgggtggggcacagccaaaccctatcactcccctccctcgtgactatgtcaggaagcttgcagtcaccttacaagtgacaccagactttgcacagctcagagccaagtgggaagggacattccctggagtgtccaacctggagaatggcaggaccgccccccttcccccgcccccgctcctccctcccctccccgctcctccttcatatcattcctgagacggcagcctcccccttttgtgttgtcagcctcagttgttttctttgtcagcacccacttaccaagcttaagctctaattacacttatctgtgctgaaaattggctattaccaccatataaactcctaatagtaagaaatacttccttagcaaactgcagggaccactttccttgttatcgcaacagaacagacagtggacagttgcttctccaggctgaacccccttgtttcctttgcttctggcggctgcaggggtgagcaaggtggtgaccgtggaagtgagagggaactggcagcgctggctgaaggtgcgggacctcaccaagggagtgacctatttcttccgtgtccaagcgcggaccatcacctacgggcccgagctccaagccaatatcacagccgggccagccgagggtaagtggaactccaggggcagacaatgtcaattgcaactttagcctcccgcctcctgcttcactgagctgagatccatctacatggtcaacaaggtgatgttggcggccaagagctggcatcaactcggggatgtctgggcaacatggacgtcttcaaaagcacgcgtcaacatggagtttgcaggtggacttgttacatccatgggcacattgttaaatattaagcatgtcaagttttagttgtttttttttttttttgagaaatcttaagaggaaaataactgaatttggcatttgaaataaatcagaaaattttaaagttttccaggtcatggggaagaagcatgtaccttcccacttatccaactgttctgccctttgtttaaagacaggaaggcgtgggctgcagaaccggcattcagggagtgctgcttagtcccgggcacagtgtggggtgccctgcacctgccagctctttcaggccctcttcaggtttttttgttgttgtttgttttttgagacagggtctcactctgtcacccaagctggagtgcagcagcatgatcatagctcactgcagcctcaacctcccccggctgaagcgatacccccaccccccaccccgcctcaccctcctgagtagctgggctacaggtgcaagccaccacacctggctacttttttttgtattttgtagagacaagtttttgcaatgttgcccaaactcctgggctcaagcgatccacctatctcagcctcccaaagtggctttcaggcgtgagccaccacgcccggccttgcctccctgttattaagatgaaaaaccctgggtgcgtgaggttaagtaacctgcccagacactctgcagcctcgaccggtctgaccccccactgtgaaatctcacggggtgggatgtgagccccgcagggctgatgcctcacctctcttttcttctttatcccgcaggatccccgggctcgcctagagatgtcctggtcaccaagtccgcctctgaactgacgctgcagtggactgagggacactctggcgacacacctaccacgggctatgtgatcgaggcccggccctcaggtagggtggcaggccccacaaacggggtctcagcccagcggacggcagtgcttctaagactgtgtcgggggcttccatcactttctctttcagcattttccccccacaaagctgggaccaagagggcggttttggtgaaagaagacatccatggctcactcagctcctcccagtcttcatagtcacaactgtgcggttcaccttaagggcatacgctttgggatgttttagccccaggacacttacttaggatgataatggttattcctagaaacaggtgaatgagaacttagggacactaaaaggcattttcaaactcatccatgaatgttttcagggactcatgtcagggttctaaatgtttgctgccgagatggaaaacgtcaggcttgtttctgataatacgaagattcttattaatagtgaaaccgacacatcgtttgcttcattttttaggcttccgaaaatgaggtctaagatccatttccagccttattcaccagaataatttttttcacccttccttccatttgcctttaataactaaggatgggcattattgggaaatgagtttctgatcgggtgcgtcggatatgactgcttggagctagtgggtatcacctaacacagaaagcacggaacagctccaatatgaccttcagatggttgcacagttaatcatgaacatctgagcatgaaaatatgtgatgtgtcagggacgctattcaggaagcaaaccatcaaaccccacctgccaatctggcaggaccacggtgctaggaactagtttagtctaatacttaaacaggctattagaccaagaggaaagaccccaaagctacatctgtcactgtgtcaggacactcgttccctcctcccccaccaaattgcttttgaaagattattagttacaagtgctttctagaaacttctttattttatttttttgagacagagtctctttctgtcacccagcctggagtgcagtggtgcaatctcagctccctgcaatctctgcctcccgggttcaagcaattctcctgcctcagcctcccgagtagctgggattacaggcacccgccatcacgcccggctaatttttatatttttagtagagagggggtttcaccatgttggccaggctggtctcaaactcctgacctcaagtgatctaccctcctcggcctcccaaagtgacaggattacaggcctgagccacggtgcccagccgccttctagaaacttctaaggagaaacctagtgcagaagcgtgaaaaagccaaaggcaacataaacatttctttggctcaataactcagaaatccagacgtgctcgcctgggggaccctgagagtatcttttgagcagggcgtctgtcctgttgtggaaacagagggtcctgagttggtaaaggatgtgagtttggcaggggcctcctgtggtcactgcctgtgaaagcccatggcccctcacacagccagctggccctttgctaatgactttgattcaagagcactttcagagactgacaggagctgagacgtgtgggttctggggccaaattgaggctttgtggaggccaagggggagggagctggtggcagggagcagcccagacttaagaaaccacttcagacactttcctccccatatccagggagagcaccgatttcttcctcaactcttccagcctgggtgacagagcaaggctccgtctcaaaaaaaaaaaaaaaagtttctagaaggcacttgtaactaataatctttcaaaagcaggttggtgggggaggagggtacgagtgtcctgacacagtgacagatataacaaataggatccaggcgttcacaaatagaattcaggagatccgtgagcttggatggggaaaatacacattttattttcactgacctctaactagaatttggcatttcctgtaattatggatgcaggcacattcgttatccagggctgccttagcaaagtcccacaaactaggcagcctccacaacagacatgggttgtctcacagttctggaggccggaagcccacagtcaaggtggcagcagggcaggctcctcctgaggctgtgagggaggatctgtttcctgtaacctctcccccacttctggtgattacaggccatcctgggtgatctggggctgacaggtgcttcacccatctctgccttcatcttcccatggtgatctccctgtatgtgtgtctgcatctcagttttatcttttatgaggacgccagtcatactagactggggacccactctactccggcaggacttcatcctaactaattacatctgcaactaccctatttccaaataagctcattgggaggtattgggggttcggacttcaacgtatgaatttgcagtggggggcagagacataattcaatgcataatattagctaagaaaccacataactcatagtaggccctgtgacacttccaggagtactttcgtatgacttccccgccattgcagatatttcacaatgctgtttagatgtgtccttacgttgaaatcacagtcatttgtagactctctgctggaccttgttggctaatgagtccatgaagcgtagacttttgagttgtgctgggataacggtggccacaggtcacctaaacccaactcttcatacgtcttccaaggaaccacgtcgctaaacaagttagtgcaaagaaaaccacccataatccatgcctccagcattacctggagacacgagttcccaggaacctgcaggtgcctccaggtgatcgtaggcattaccagttctgtgactccgttctcacattgccataaagaaatgtctgagactgagtaatttataaagaaaaaaagtttagttggctcacagttctgcaggctgtacaggaagcatggtggctttgcttctggggaggccccaggaaatcatggggagaccccaggaagcttccaatcatggcagaaagccaacagggagccggcacgccacatggctggggcaggaggaagagagtgagtggggaggtgccacacgtttttaaacaaccaggtctcatgagaactcactccctattgtaagaacagcaccaaaggggtggtcctaaaaccattcatgagaaacccactgctgtgatccaaacacctcccaccaggcccctcccccaacaccggggacgataattcaacctgagatttgggtggggacacagagccaaacaatatcaccagtagaattggtttccttttcaattttagtttatatatctacaaccattctgagaaagtgtccttgagccaacagatcgccacagggacccatggtgccgagagcagattaaaaagcctgtaatcccagcactttgggaggccgaggtgggcggatcacttgaggtcaggagtttaagaccagcctgaccaacatggtgaaacccagtctgtactacaaatagaaaaaaattagctgggtgtggtggcatgcacctatagtcccagctactcgggaagctgaggcaggagaattgcttgaacccagaaggcagaggttgcagtgagctgagatgacgccactgcactctagcctgggcaacagagtgagactctgtctcaaaaaaaaaaaaaaaaaaaaaaaaaaaaaaaaaaagacacccgcactagaaaactacagaagggcctggctacgaaacttcctcctccctgaacgcctgcctccctgactacagattaaggatcccagcagatgggtggctgtcacagggtcacagaaggaggcattctggatctcgaccgcatccctgcccatgtcccagttgtgagactgcagcacagttttgcaggatgttaccactgggggacactgggtaaaggatacacagacttgctctccgttgtttcttacaaccgcttgggactcttcaactacctcaaaatgatatgtttagcgtcaagtaatcattgaaaaagccacggtgtccgtcctccccagcctgctcggacaagcacaccaatgtgtctttgagcactcttgtgtgggagagcggcctgtgggatggggcggtaccagccagacacgggtgcctgggctcagcctcttaacgctgtgaacacatctcagcattttccaggcagcgataaggcattggttctcaggcttgccgagagagcccttgactttctcctcaggttctcatatgctgctccgccggctgcacgaagggaacaggacgcctgttggttactggtgcggcccagggagcctggcaggccgtgcggattagaagtaattggcgtgtcggcgagggcttcacactgggcccacgcctcagagtggcttgcctaacatggagaagcttctgaagtcagctgagtctgagctcagcagggttggggccagtgtgtggaaactgacccacaggggaccaagatgtgacaacagacttatcaagaagaccccagctttttcggcgagggctgaagatcctgcacttaattctgcttggctgctcaacattcaaaagcaggtcgccaacgatctcccctttcggatcatgaagggaacccaagcaggccgcgggacccgtgttctttcatgggaagttgagacgccccctcccttcaatgattaaggccagcagcagctcaggcaaatgaaacgctttatggattgtcaatatttaagcaccttgctggtacctgagggctttggatctcagctgtcatccattacaggcctcattacacaaaacattaaatgctgtatcatctcattttcccaccgaagctccctggcaagacgttctccaggtggggtgtggtttgctccaggtgcaatgaatgggccccgttttgtattgggaggggccacacaggggccctcaccgctgggtatctgggagacgggcactcggtgccaggcagcccctctggcccacgtggtcggctcggcctgatgtctctctatccagctgagtctctaccttgcccctgggagacaagacactcatcagctttgttgctgctttgcagagggtggccagcgggcctgggcagcccgggcagatggtagtggagcgtgctgccctcccatccccatccttccttacaccccccgcacattctactgcatagcccctgttgctgtggccatgtggagacgcagaactgagcagcagctaatgaaattagcaccaggctagaacacagatcccctcttattcctggagagggcgctccatgagtgtgagcccaaggacaccgccaccagcttccaccagcatggcctggcccacacgttcctttctctggctgtgcgtaagtttcctccaaattggtgttgcaaaactccctggaaggcactggaaactatgcactggacatatgcagatgatctatttacacagattattctaaggcattttactgggtagatcatgaagcctaatttacatatttacacaatagactggaatgacgctaaaggaactataaatatattttcctctccaaagcagccatgaaatacatatttagaatgtgcccaatgcaggcagatattgtattgcattttttttttttttcttaaataatgtgtgtagcccagagacgagggcaggtggctggaggacaggtcccgtgcctgatggggacaccccccagccggaggcctggactgctgtccactcgtagtcccctgggggctttccagttccctccccattgattttgttcaatttcagtctttggcaacgggagttttcaagtgagtaaggaagaaaatcagtatttctctgaaggtttgacatccatagaagttccaagtcagcaggttcagcaagagggggctgttgccatggctctgatggtgcccggtcccctcatgtgctgcttgtctttctcataagctgcttgtctttctcataagcgtgtttctgacagcttgtcagcccggcttcccaccccttcctgggatcagcctgcaacacgggctttcttcgtcatcttaacatgcaatgcattttgcctcctgccttgaatgaggatccgatggaaggtaactgtcttttttttaaatcagatgtatttagcctcatgtttaagcgccaccagcttcagtaaaatttctaacctggattggccattcatacaaaaagaaatggcagtatttaagaaataaacaactgacaggcttgcatttgctctgagctgcagactgacagtcaagcggttggttgtgtgagtgcgtggaaccagaaatctcaggcagtgaatgacggtttcattcagcatggagaccctgtttaattgtccatgaaatcaaacttttgtattggcatgacgtcggccctaatacctgcagcacgcagctccgttctgggcgttggagggataaattgagtgcagacccttcgacgtgctgcgctgggctccagctcaattcagaaaagaggtgatcatgtttctgggtgtattaggacattgtctgggaacagatgtgcctcctaccgcttgggcggggggagatgctggcaccagaagctaacagctgactcattctgtcggctggagacaagcatggatggatagcagaacctatttatacagaaaagatttcttttttcaaggatcttcaatattagccacttacttcccttgtttaagtggacaaatcacgccgtaaaaaatgaagatgcatagttcatattctttaaagaaaagccgcctcaatgggaagctgaactggctcttgctttttcccactcagccttccttctgaggtggacaggattggaggttgtggtgacagcgtggcttcttcaggaatattttgcaaagtctctttctcagtggcttcccactttcttagtggtatttctccaatggcgtttcagtaacaagagtccaggaaggtgctctttcgggcagccaggaatgaaagaccaagcacgatagacaggtgtgatttgcagtcacatcaccatgagggcacctccgccctccacagacatgaagtggcaggtccagcccagaggtggacattacccacaggaagttcaaaccctgggcctcagcaggggacttgatgcctgcatcagtcattttgggggatcagtgatctggggatgtggctttttaggggacatgactgtcctcttccagccgggcattgcttttctcttttctttttgaaaccgagtctcactctgttgcccaggctggagtgcagtggtgcaatctcggctcactgcaaccttcacctcccgggatcaagcgattctcctgcctcagtctcctgagtagctgggattacaggagcgtgccatcatacccagctaatttttgtatttttagtagagacggggtttcaccatgttgatcaggctggtcttgaactcgtgacctcgtgatctgtctacctcggtctcccaaagtgctgagattacaggcgggagccactgcacccggcccttgcttttcctacaacggcaacacagctcgttcactggggaagagaaaccaggctggctcttccggacatcccagagagctgaccctagcctgggtgattgacaagtggctgactgtgtgcccagaattgcctttaaaaaggatgaggccctgctgtcctctcgagtgttgactgagatggaaatccaggcactggggactgtccagaacatggaaaaattggttgcataaatctcatttttgctaatagttctgtaatgttattttccccctaatttgtagagatacttttctccatcattgatttattgagatatttaacagcataatacaaatgagaaaaacaatccacagttgagaaatagagtggacgccttaccagctgccaaatttttttcttacccactcgtgatcgtggtgtaaatattagtacgagataagtagcccggtgaattatagctagagtggaaaatatgctaatttgggaaaggcagaagtaagcagaataaaaatgggaacattttcttctgttaattcagaaggaaattatctcggtatgacattccccctcacccaacatttttgagtgtaaatggattgctaaataaatcgttctgcgttaagattctgtatcaatattttaaaatgttattatgaaaaatgcacacaattcctggagctatgacagagtgcttaaaataaaatgtggcctttaggtgatggtacaggaagggagaatcattttttttttcctcaggagcaggaaagcattacagaaacattaatgcaaaagacattcagagaatccactccggaggtgttcagaccttctcagaacagtctgaagaaatccttcactttcttagtcccttaatttcaatggctttaagcaacacccagtttataagagtctgtatttggtctttagtgtctattacaacataaaattgtctatctttttagaggaaaaatacaattcattcaatatataaagcccttaaaatagagacttgctcacagtaagcagtaaataaaatagtggtggttattatttattgaaagcctgctgtactaggccctgagaaagcccatgggatacaaagaggaatgcaggggttgggggtgggacagatgggtggatgggtggaaggaagaatggatggataatggatggatggatggatggaaggagggggacccagaaggaaggaaggaaggaaggaaggaaggaaggaaggaaggaagggtgggcaggcagatggatgggaggtggatgagtgggtggctggtgggtgagtggatggatagatgaatggaaggaaggaaggaagggtgggtgggtgggtggattgatgggtaggtagatgagtagatgtgtggatggatggacgaatggatagatggataggtggatgggtgagtgggtggatgaatggatgaatggatgggtggatggatgaatgaattgatgaaggaaggatgaatggatggatggatgaatgaatggatggatgcctggatggatagatggatggatggctagagggaagggaagggagggcaggggagggaaggggaggaaagggaagggaagggagggcacaggaggagagggaaggggagtggagggcagggggaaggaaggagggagggaaggaaggaaagaaggttggttacatggatgaatggaaggaaggaaggaaaaatggatggatggatagaaggaaggatgaatggatggataatgaatggatggatggatgattacttaggaagatggatcatggaaagatggacagaaggatggatggatagatgatagctggagggaaggaaggaagaatggaatggatggatggttacatggatggatgggtggatggatgatgctaagcctgatggtgtgaacagccaggtaaatgtgctgatgtgatttagaagcccattggtggaagcagtcatcccttcctggaacgtggggtggggtcaaggttgacctcaaaaagatgagtctgagggggcaaaaggactcttgattttcctccatcccctgtccacaggctgtgcgtaagtcattagaacagcaatctcatctgattccctgatggatggcacagggtctgatcaaagagtagaccgcatttgtggatgaataagggagtgaggcaggggaggagggggcaacagttctccaggtccagaggaggcctgaacagagtaaatgcacaagccttccctgaccattcttaagccaaactcacatacgacaatataaaccacatacaaccagcataaactacatacagccagcaatctgtgtgtgaacctcagcatcctaggagaaagaaggtaggcttaggctctggcttgccattctgacattattagtggtgatgagtgtcttggtgagaaatggctgtaaatgagaatatttagaaataatggccaggcatagtggctcatgcctataattccagcactttgagaggccaaggcaggcagatggcttgagctcggcagttcgagcccagcctgggcaacacagggagaccctgtcactacaaaaaaaaaaaaaaattaacaacttagccaggcgtggtggcgcatgcctgtagacccagctatccaggagactgaggcaggaggataacttgagtccagtagtttgaggctgcagtgagctatgattgcaccactgcactccagcctgtgtggacagaggagggcccggtctcaaaaaaaaaaaagaaaggaagaagaaagaaagagcaagagagaaagcaatcagagagggagggagggagggaagatcagtattatactacctttctgccggtggagagatttgtacctttaaaatctcattcacgtctattcctcattaacctgtgactgtaaggacttagtcggtgcacattctaaatcctctgcaaatacagacagatacaatagcaattttctgcctatttactgttgggctaatccatctgagtgtacctggtgattccgggtgggtgataaggttggtttccggagcagtctcagtgcccataaagtagtcagcacgggtacacacatatccaaatgggttttccctcaccagattccctgctttgtaaaagatctcatagctgcacctagaaaagcaaatacagttcatgaaggattgctacttcaaatgaacattttggcctctgagcctactttttttttttttttttttttaaccaaacagcctccttagaattgaatttatacaaacacacgtacagcacttactatgtgtgaggcactgtcctaagcactttataaatattaacttacttaatcctcaaagcaaatctatgatgaagatgcctttgttatcaccattctacagacaagggtcagagaggttccgttctttgtctaaagccacacagctaattgaattggtggggccaggctttgcaaagaggctgtctagctccaggctccagcacccctttcagccctgatgctatagtgtcataagtttttttctttctttttttttttccttttttctttttttcttttcttttcttttctttcttttttttttttttttgttataatgtgaagtcataaaaattgcaaagttctttgtttgttttttgagatagagtctcactctgttacccaggctgtagtgcaatggcacaatctcagctcagctcactgcaacctcaacctcccaggctcaagcaatcctcctgcttcagcctcttgagtagtagtagggaccacaggtgcatgccaccatgcctggctaatttttaaaattgtgcatatatatgtttccctgtgttgcccaggctggtctccagctctgggctcaagcagtcctgtaaccgcagcctctcaaagtactgggataacaggcatgagccaccatgcctggctcatcgtgattctttacaacaaatctcactgatcacatttcttttgctctgtggctggagagatgcctcagaacccaagtcatgtgcctctaacatcctctctatgtctgattttaattttaaatttattaatggctttaattttgagtttattcatgttttcttatatgtgaggtttataataaatcatacatacatatatttactgtggggagatatgcataacctaacgtttcccactatgaccatttcaagtgtccagttcagtagcattgagcacgttgttctacaatcatcacaccattcatctccagaacgctcttcgacttgcgaaactgagactccgtccccattcagcactcactccgcatccagtgcccctgatgcctcatccagggctgctgcaagccgacccaccaggcaggtgcatggggctcgcatctgggacttcgcacttctaacctctgctctcgcctccccatccctcttgcagatgaaggcttatgggacatgtttgtgaaggacatcccgcggagcgccacatcctacaccctcagcctggataagctccggcaaggagtgacttacgagttccgggtggtggctgtgaatgaggcgggctacggggagcccagcaacccctccacggctgtgtcaggtaggccctcccagggaggtctgtcttcttctggaggactagagggagaaatggggtcgagggggacccagggaggtctgtcttctcctgaagggtgggagggagaaatggggtcgagggggacccagggaggtctgtcttctcctgaaggatgggagggagaaatggggtcgagggggaccctgggaggtctgtcttctcctgaaggacgggagagagaaatgaagtcaagcgggacgaaagggacacacatctgctgctgtaggtgtctccagcttagttgaggttctgcccagggaacatgtgggtggggagagcagtgccagtctccgggtgcctccccagtgccacccatcctcctgggctgctccctgcttccctctggcaggaccccaggccccagagcctcccccagcaccaccagcaaggccccttatgggctttgtgtccacgctgtgcaccggcaattcctaatgtgtttcctcatagttttaaaaatcagagacacatggaagtgtcagaggtgtgagcatgagccacgtggtgtcccctccgcaacaaaatcattcgcaaggaaagcagagccccgatcccctgtgttagctgacgcatccttgccgaggagcatgtgtgattttggaggggcaagaaccaccccggcagctatgggggagcccacgagtgcctgacaagaggtcacgtcttcctgggacctcccagaaagccagcggaggggccggggatagtagctgctctgggctcaaggtgagcagtattgccgtccctgaggatggcgtgcaggtgaaggtactgccgatcccaggctgggcatttcttcacgtgcacaccttcgctgtgaggtaccgcaggctccagaggccaccctgggtccaggtccaggtctgctctcaggggagtggcagagaaggccagggcagggcttcctccccgagagcacccgtgttagatgacagacatgtctgcagtcagcagtcatggcaggggttatgacacacagggtgggggctgtgacctcgcctgggaatcaggaaggtgcccaaagcctaccacaggggaagggaaacctgcaggaggcagaaggtggcggagaaaaagtcctggtcactgaagagccgtgggtgggggagctggagagggagggccggcaaagctggtccctggttgtggccccccagccccccatgtgcctgtgagggactcaaccctggccgcaccttagggttgcttgagaaagttaaacacacaccctcgctggcccctcaccccagacagtgacttccgtggctccaggcgtgactttctttaccccgcgatgattctatcgtgcagaccggctgcaagccagggcgctggggggttcagagagggatgggctgtgtttgaggagaggggatctcagcagcatgaagggcagggaggcctcggcgttggggcagcagagcctcagccagaagccccaggtagggccagctctgttggtcctcttcctgggattaggaagaagctgttcctctcctctgcgttagagctgcttgagctactgactgcacttgttgaaattgaacttaaccttcgtcctttatgtgctatgagtttggaggaacgaccctgtgctcgtctgtgggtgagcgtgggccctaagcctggtaccctggcctgggaacatccttgaattccggggttgctctgtgagaggggctgtgaggaagggacccagaggaccacctgattttattttttttgagatggagtctcactctgttgcccaggctggagtgcagtggcgtgatcttagctcactgcaacctccgtctcccgggttcaagggattctcctgcctcagctcgcaagcagctgagattacaagcatgtgccaccacgcccggctaatttttgtatttttagtagatacagggtttcaccctgttggccaggctggtctcgaactcctgacctcaagtgatccgcctgccttggcctcccaaagtgctgggattataggagtgagtcacggcgcccagctgaccacttgattttttaatgagtaagatttagaaaaagcacagatttctcatttccctaattttaattatgaatattttaaatgtaccccaaagtatagagaatgaggaaccctcagcacccctcatcctaattcagagatccaagatttactgcctgagttttatctgtggaaaattggtacagagcaattacacatgcacagaaagccggttcctcatgcggaacgtgcactttgaccccacttcccagggcctgtggttcaggcctctctgaaactccatcagacgcagagctggccttgccatgagctggaccgcactgagctcatcagtccttcagggaagccagcaaccatcacctgctggcgtcaggaccgggccaggcccgcagccagggtgtcctgccccgtatgagagtcctccaggacagcccggccttcctttcctaccaggtgctggggtcaggcccactccgggccagttgcccggtggtgtaagtgtggcatgcgtcagacttgccgcatggagtaccaaatgcgcagcccacaaacctacttctgtcttttggatttaaagcaccgtcacctcctaaggagccctgtgaacctgcattagccaaagccgattccctgttcttcttcccggtgtgcacacatcccctattcgtgagatataggatagaagcttcgggtggctgtgtttggaagggttctggctgccgtgagccaatgcctgggctttgcctgtgagaggctttctgttctggggggcttccagtgccacagaacctactccccttccaggcccatggaaggccctgaatgggacgccgggaccacccagcacccatcaagatacaatttcccgcttttctgttctgagcgagcagaacgagacagaaggaagaagagcgtccttcaaagccgcctttacatgcatttttttctattgatttctcaaaaacacatctaaagacagggccagtcgttcagcttggttttgctagaggcagaaaataaataaaacacagccccaggctttaggggtctgtggcctgtggaggggccaacaggtagagaagcaaatacacacagtgcgtgtttgcggcgggggcttccatagacgtgcagacggcaggtcctggggtgcttcgtgggctcagggttcaccccgtggctgttgggaaccactgaggattttaggggggacaactgatttctatcggaggaagacctctcttgggtgatgtaaaggatggatctgagcaagacaggaggaggcgtaacaggtggaatgtgagtgctgtgcgcaggcaggaggtggtgacggagaaggcaggggacctggagctgttttggggggtgtcccagcaccaggagagagaaggacgtctaggcgctttgttccatcctcactttaacccacacaacgtttttgtttgctgccttgcttgttttgtggagacagggtcttgttctgtcacccaggctggagtgcagtgctgtgatcgtggctcactacagcctcgacctcctgggctcaagtgatcctcccgcctcagcctcctgagtagctgggactacaggtgtgccaccataccttgttttgtagagaaaggggtcttgctatgttgcccaggctggtcttgaactcctgggcttaagccatcctcccacctcagccttccacagtgctgggacttcaggcacacgcctctgtgcctggctgtttttttgttttgttttgttttgtttgttttttgtttttttagagatgggatctcactacattgcactggatcaggcagtgtttttaaacagatgaaattaagagaaagcaagcaggaagggcggttttgatgggcaaggtcagggcaaggacaaagatactgaagtctccagggcagggggcagcttggaggacagaggagccctgagcctgatcccacagaaaaggtggcaaatgggggctgttgaattcccaaagcctgctgaggaccatgggagcctcctgagcttgtcccatgggaaaagtccacccgcccggctggacattggtttcatctcacctgtaactgggagttatctaccccagccttccctgccaaccacctgactcgcgggaggtgactgcagctggagcgtctgccccatgtcattgtgtgtccgtgtcttttccacagctcaagtggaagccccattctacgaggagtggtggttcctcctggtgatggctctgtccagcctgatcgtcatcctgctggtggtgttcgccctcgtcctgcacgggcagaataagaagtataagaactgcagcacaggtgcaggtccagccccttcctcgcgtgtcccacgatgccactcagccaaaacatagcgttcgttctctcgtggatctgccgggcccgtgtctgcttttccatttcatttgcttgtaggtgctgagagaaatgcaataggttttctttctgggggcagccaggcacagtgcagcaaacgctctatgcctcgggacccagatgctgaccctgcctgccctcagattaactatgtgtcttggataagggcgtatgagtcatccagcctcagagatccccactctgtacctttgttcaaatgcaattgctttttttttttttacagtctcactctgtcacccaggttggagtgcactggcacaatctcggctcacagcaacctctgtctcctgcattcaagtgattctcctgcctcagcctcctgagtagctgggattacaggcgcctgccactacgcccggctaatttttgtatttttagtagaggcggggtttcaccatgttggccaggctggtctcgaaatcctgacctcaggtgatctgcccgcctcagcctcccaaagtgttgggattacagacgtgagccacggtgcccaacctaatcacattttttaatagtattagaaagtgaggtgtgtctgggaatggtggcttatgcctgtaatcctagtgattttggaggctaaggctgaggatcacctgagcctaggagatccaggttgcagtaagccatgatcacaccactgtactccagcctggacaacaaagcgagatcctgtctcttttttttttttaatttgagatggagtttcactcttgttgccatggtgcagtctaggcttactgcaacctccacctcctgggttcaagcaattcgcctgcctcagcctccccagtagctaggattacaggcatgcatctccacgcccggctaattttgtatttttaatatggatggggtttctccatgttggtcaggctggtctcgaacacctcacctcaggtgatccacctgcctcagcctcccaaagtactgggattacaggtgtgagccaccgcgccctgccgagatcctgtctcttacaaaaaaaaaaagtatagagcattaaacaggtggcatattgtactatgcaatattataaacacagtgacctggggcactgctcagacgttgatgttttgctgtggctcagagactgtcacagaagcatctccatggcatagctcttctcacccactgcagcttgaaccttgcctgtgtccgtggtctagctctgagccgtctgagggccaggtcactactgtgtttccagcagaaactccacaccaggcatagagcaagcattcagtcaataagcatttattgccgaatgacccactatcattagagaaaggagcaaatgaacgtagggtaaagccagccacagagagcacagaccttgtgactccatttacatgaaggccaggaacacccacagtgaatggaagtttccagaaggcagaatcctgcttgcctgttggtggagaggtataaacagggaagatgcatgagagcacctcacaggtgctaaatgtgctctgtctctctacgtggacggtagttacattcacaatcataaagcatcattctggacacttaagattagcatagcttgtgcatttgattatcgtcaattttaaaaacctcataattatcaatgagaccacttctctggataaccagaatgtaactgactgctagaccgcagcctgttttttgttttttaaatagacgggtttcaccatgttggccaggctggtctcgaactccagggctacggtgatcctcccacctcagcctcccaaagtgctgggattacaggagtgagccacgcacggcgcccggcctatggcctgttttgatcctacggagcatccaccagagctgtagctgagcccaggaatgtggtcacttctgtgatatcaccacaaccgctgggccagacctcttcctgagctcagctcatttgttggaggttttcccatcaactgggtcttctctttttggaaaggcagatccctgatgagctgttcttaaaaagaggagctggctacattagccccctgagccaaggagccaggcagagtaggttcctgaccccgaccacaagtcctaccatccttgtgccaaaggggttaaaaaaaccagtcacctaaaatgcctccttatttgcttctataatgttaagcaattcatccttcaaagaaaggatttatttttttctgtataaattcacttctaacaagtgttcgtaaatcagattttattcctgagggatttacagtgtatgaatggcgtgtcattttcctgagttaatgctattacagaatcctgtgtctggtgcatagaaaaatctccctgcttttcactgtcctcctccatctggaaaacagacttgaaaaggcagatcggacctgcagcttccgatgctcagccgcaccctggagtgttaatttaacatcataattgaagccgggaaaaaataacacttatctaccagaatgtctcccgtcctgcccaggagacattgcagaacttaaacctctgttgtgatggcctcactcgacacccctccctgcgtgcactccttatcctcccatcctcgtctgaattcctttctgatcttggtttccacctgctcacctcccatcatcccaaatcccctctcccaggcaagcccatctttcattttctgctctgtgttcttccgttaaacacagagcattaaggtttaaagcacgtcaaaggggggccaggtcccagcagagaggagcctcttggggtttagaaatgccaacgcacttagcaaatacctgccaagcccctggtatgtgtgtaggcgctgtcctgggggctggcgggacactggggagtgtgatggacttaagtctgtacctcaaagagcaaatatgtacatgggcctgagaaacagaggtcactttatgtggtcagggaggtcgcctctggtctcagggcgtttgagctgtgatctgcaggaaggggagagaaacccgggaaatactgggagaaggagcttccagcaagagggagagccccagggggagaaacccgtgttagggaggggctgagggctggaagatgacgcgggggtttgcagggtggacagaccaggccaagcttgggggcagtttggaggccttggtctttcctgcagaatgagccgggaaaacccagtgcaattattttttatgttgttcggtttttcagaactttatttttattcatttgatctgttaatatattttagaatgtgttttgctatgtatttgtaaatttactcttttttgaagtgtgcggttcagtggtgaacgcacaggtacgtgcagtcatgaccacagtcagttctagaacgttcgtgtcacctcaaaaggaagctctgtaccctttctttagccgtcacactcccacacatttatctttacttcctgttttgttaaatgagtgtgagtttttattttgaaatttattaaatatttaatttcccggaatttttagaagtgtatgcattcttggccaggtgcagtggctcacgcttgccatcccagcactttgagaggccgaggtggaaggatcacttgagcccaggaactcgaaaccagcctgggcaacgtagcgagaccccatctctaccaaaacaaacaaacaaaaaatcaaaaaaagtttatgcattctgagtctattttcataaaacactggcaagaatactggtattttgggatcagacagaacaaatatgaaaatgctaatattgtcactttgctccaacactgtgatcagtacctagctcttctccccagctcagccctaagcacagctgaagcaggtatcctcagctctgggctctgcgtgcagcaggactcaggagctgccccgctggccagctctggcttggcgtggctgcggtggccacaccagtaacacgtctgttctcactctcctgctgggctttaggaaaggggatctccaccatggaggagtctgtgaccctggacaacggaggatttgctgccctggagctcagcagccgccacctcaatgtcaagagcaccttctccaagaagaacgggaccaggtaggcaggcagtgctgtgctgcgcccacctggggatctgagctgccagggctggggtggcagcccacgcccactggcacctcctgcatcccgccctgtggttccaggaagcaaaacccaacccaccgccaagtgcgctcccaaaccaccaggggcagccctgagtctaggagggacggggtcggcagagcggctggaaatattttcaggacatctccggagatttagaaagagggtctcaggtgtgtgggaagggcctggaacacccaggggctgccaggctggccttctgtgtcaatcgcatgcaccttggatctgggcgttcctagttcatggaggtgtcacctgggctgccacaggcccgaccaggtgtcctcgcaagcaagcctggtgcttgttgctgatttcattgctctgtgtattccaaagttttcctgtgccgatacacattgccattccatacacggattgagtgcaggcgagaaggattttcatcaccatagcctccttagcttataatccttttcctaaatccagcaggaagcagggtttcccaaacaagagaggggttgacctgggtttgcctttttgatgtgcagagcgccatcctctgatttgagtacccttgaccaaggagaagggccaggaatggggaggggtcttgagcgtctggaaggaaaaacccaaacacctgaggacgcttcgtctggagaacagacagctccgggctttcccagggtgccccagcatcggggtggaggaggcttctctccctcagccagactcaccttggattagactcagctgcaagggtgtggaaatcacacatcatccagacccagacagaccccagggtttcctcttccctttactgtttacaaagctgcaggggccagcagtgtttggagattccctgggccgcccccgccctccactgaatttgggaatcttagatcactcgggtggcgccgaggcacgggtgggccttctcccagccactgacgctctgccagccccacaggtgccagtccaaagcaccgcaggccgccaccccacgaggccttcccaagggctggaggtggatgctggtggtgacatctggtcacacctttcatttcatttgtctactgggaggcaagtttttcctgccgtgtaatagaaacatgaaaaagcaaccacatgtagtttcaaggccaggaggaacttgtcacagagaattttaagatattacatgccctgcttccttgctgcaactctgtcttctgagttctgagaagagacacagccttgaagcacattgcccaagaatagacagtcgttcagtttgttaagtccatctgcttcctaggaaagagaaacatcatttgatggtgaggttggaggttctcagcccacaaagacccaaggacaaaataaaattaagatggaaaagaaaatggacccttcccttaggtttttaaataagccatcaccttttcagtcctagcaataggaccctgtattcatctgtcctcacgctgctaataaagacatacccaagactgggtagtttatacaggaaagaggtttaatggactcacagttccacatggctggggagacctcacaatcatggcggaaggcaaggaggagcaaagtcacgtcttacgtggtggcaggcaaagagagagtttgtgtagggaaactcccctttataaaaccatcagatcgtgtgagacttattcactctcacgagaacagcacgggaaagacctgcccccatgattcaagtacctcccaccaggtccctcccacgtcacatgggaatgatgggagccacaactcaagatgagatttgggtggggacacagccaaaccatatcagaccccacatgtgattgaaggaaaggattctctgctgagaggggaagggtctgggcagggacacctgagattggtcctgtagcatcatccccaaaatatcttagaaatacgggcacagttgatttatgtctcccccgtgcacgtttgtgcttccaatttctttttggggaagacaccattttagctccttagataaaaagatttacccaaatgtttagataagaaatggcatctttcccaaagtaaattacctttgagatagagaaagaaaggcccttgagccttcactgggcctttccaggagaaactgaggcacaccctgggggagacaacacccacgacacaaaaccagaggtctccatcccctccagccttcccagcagagtctccacccaaggcctggtttcctggcctgtagcctctccttgatcacccagtgttacttctcccattgagggatgagaagacacttcctctgtagctgccactcagttctgcactcactcctcgcagcatgagggagggcttgctgggttgctgggggtcctggacatggtccctttgagcacacagctgcctgtctgactgcccacaggctgctctcactatcgagtccctgcacacccttcggaggactaaggagcactcagtcctgcctgatgtgaaaattcagcaatgttgtactcagagtttttccccaagttctgagttctccatctgaaaaacagaagctgggcttttactcagctcagatagtcaccaggaagtggggagctgaagagggtactcattttctatcgctgcatggcaaatgatcacaagttcagcagcttaaaccaacacccatttagcaccacgcggtctccctggggcaggagtctgggcacagctcagctgggtcctctgctcagggccttgcatgggtgtaatccaggtgtagatgggctgtgttctcatctggaggctcaactgggcaagaatcttcttccaagctcattcagcctgctggcagcatgcatttccttgtggccgcatgactgagggccccagcctcttcttggccctcctctggaggccgccctcatgtcctggaggccgctcatggtcccctgccatggggtcctctccaggggctgttcacaacatactgttggcttctgtgaggccagcaagagcatctctgtctccagtccgccaagatagggtctcctaatgtcatgtgatcatgggcgtgatgggagtagctgtccttcacccattccatttaatgtaaccgagtcttcagtctgccatgttccactggttagaagcacgtcacaggcccttcccacattcaaaggatgggatgatgggggtgggggcagtgatggagccatcttagaattccaccagccagagaggacgaatgctcccccaccagacagggagaccaggcctggtgcaaacttccccaattccctctcatctgtaggagacaattcccactccttagcatggcagatcagactgttcctcatgactccatcctcatctctctccactgcactcccctgcctgcatctggcaagcacctaagctccccggcctcctatctgtcccgacctcagggtgctgtttgtacgtgagtgtctcactgcccctcctggcacagaccagctcttcctccatgcctgcaggcctagcacagtctccacaactgacaggcacaggtacacagaggctgttgactcaccaggtagccagtgctcagaattttttgcatcagttgccaaagtgatgtcaaaggctgtgggtttcctcttagtccaacgcaataaaggccaaatgccaggttaggagtcctccggggaagggcgtcttttgcccagagggtaattgcagcatgggtcctcatcctaggtccccaccccggcctagccccggcggcctgcactactcagacgaggacatctgcaacaagtacaacggcgccgtgctgaccgagagcgtgagcctcaaggagaagtcggcagatgcatcagaatctgaggtcagtgtcggtgcctacttccgggcagtgaccatcagcccctacttctgcagtgagacttctgccccctcaggctgtcttgtcctatttgagtctcataacatccccacaggcagagccaaggacaaagggcttcattatgcagatgagaaaagagccgaaattcaaccccacggcctgctctgggccccgcagagctcacatagcctcgagcagtctagacattccaaggctgattcatggaggagcaggttgtgactcctaagtcctgggatctgctttaggcccagcagagctcacacagcttcgagcagtctagatgctccaaggctgattgatggaagcgcaggttccgactcctaagtcccagagactgcagtgagagataggcaaggctggtgccctctgtgagaggtttcttgcagagcagagtgtgggtgttgcctgggtgccagcaggctgagtgtcagatggtcgctttcacgtgctccatctcatgtagtcccggggtaactgggcctagaccacctcttacagatggagccggcagggctcagggaagatcagtaactttcccagtgtggactcctgcctcggaggcccattctctctccatttcactttcatagataaacataggctgccataaaaattggtggtctgtagaccccagttagggtggcagcgggtctgatcctgcagggcggatagaaaatgtgacccctttaccagataggagcttcctgctcacccctggacattcgtttccccctacaccctgccagcctcccaccctgcccaggaagcttctgtcctagctccctcccttgcgctgaagaagagggatttgctcacagcagttccaggtcatgtatcgggctcagggtgaatccagacttgggatgtgttcctctcctcaccaagcagctggaccagggagatggcttccccgagggagtgtcagcctccacgcgctccctccaggaccccagggcctacccgcctcaggcctcccctgcgcctgggtgtgcagcagttgagacatggagtgtttttcctgtgccaggtcctgtgcggcgtgacccaaagggactttaaccagcaaggcagccacgagggggctctaagcagggggctcaacacaccttccctacaggtgcaccatctccgtttctcatacttaccagcaaaagcagcagaagcagcaattggagaggttgccccttgggtcctgaacttttttcttttggatatgccaggcctggagaggggtgaaaatcaccaaccattggctgtacacataggcctgccccgcctcctggcactcaggttctaaatcaatatttaatctaaaataagtctcaccttcattttaacctgaattcaggccttattgagccccggggctctatcgaatggcttcttttcaactgtgggttgtagatgaactcccggcgggaagggccagcaggtgggtgtggtgaggccgattctgctttgctttgcgtgttctgtttacagaggatgccgggtttgctgtccgcaccatagccttgggcttggcagaaacagcaggcagcaaagcagatgctcggaaagggacatttgtctaaaactcaggggctgtcaagtgaaatcctgcaaaactacctgcctttttgtgataaagaaaaagcttatcagaagctcgctgcatgtacgaaagcagcaggttgtgcggagcaggcagccttcgagcaggacagtctggtcagcaaagaggctcatctcacagcgccggcctcgggcctgtccctgctgccgctgccgggccgctgctctttcgagtatccaggcaccgtgggggtgtcatagctgtgggtggttcctgtgtgctgagcgctcgctgctgtgtgtttccagcactcactgtgggcctggcccagggtgaacgtgcactcctctgctgcccaccccagccccatgaggtggggccagtctccttattggtcagaggctgaggttgtccagcaggcggctgttgaagctgacacccagccagacccccgtgtctccagagctcagtgtaccccttccctccccattggtctcctccagccccacaccagaggaaggggagggaggcatccagggatggtgtgtcctagagcaggcgggcaggattggatctgtgaactctgaatatttgttcctaaaagcattttcaacatgggctaatggaacgcatttggtctgtttctccccccaacatatgtggcgtgtttggagatttaacatcggcaaatgtttatggaagattattgagcacacccgtgaactgagctaagcatatacattcacgtatgcatgcacacatgaacacatatgtacatgtacacacatgtgcacggacacatacacacctgaatacatgcacacacctgcatacacacatgcatacctaaatagaacacacaacacacacacctaaatacacacacacgcacacatatctatacatacacacatgcacacacatatacatatacacctgaatacatgcacacacacgtttacctaaatacaacatacacctaaatacacatatgcacacatatgtacacatacacacatgcacacacgtatacctatacacctgaatacatgcacacatgcatacacacgtgcttacctaaatacacacaacatatacacacctaaatacacatatgcacacatacgtacacatacacacatgcaaacacatacatatacctatacacctgaatacatgcacacacatgcatacttaaatacacacaaacatgcacatacctaaatacacacacatgtacacatacctgtgcacatgtacaaataactacacacctgaatacatgcacacacatacatgcacacatgtacacacacgcacacgcacatacccaaatatgtacatgcaaaaatttgcatgtgcacacatacatcatatactcatacatatacctacatacctaaacacatgcacacaggcacatggctcacacatactacatgcatgtacgcatgcatatatacacgtgcatgcatacctaaatacaagtacaagcacacatgcataccaccatgcacacatacacatatgtacatacatgcacaacacatacatacctaaatacacacatacacatatgtacatacatgcacaacacatacatacctaaatacacacatgcacacatgcctgcacatatgcatatacacctaaatacaaacacatacacagaggtggcctcagggagggaggtgagtgtggggagggagggaggtgagtgtggggataggggaagaagggtggagggcaggacatggaacccacactaaatggaattctgcacagagggtgttatcatccttatgtaacaggcagaaagccgagactgagagtttttgaatgtcttccctgagacacgcactgatgagctggactggagaggcagacctcagcatctaactggaaatcccaccttcccaccagtcctgctctcagagctgagtctcaggcagcgtggctgaggtggcaaggggcctgggaaccaggccacactgctcccacatggcaagccctgtgctggaggaaagcgttcctgcaaatgcacctcatggttcctagtgccttttgggtgacaggctgcttctggaggctgatgaaaggtgcagacatgctctccacctacatacaggcagaatttcacctaggatttgggggcccaaggcaccccggaagtctcttacagaccccaccagctagcatcccatagagtcccagctaagaatccccacacctggaccatcctgtgctccccaggtttttgagtggataaagcgtagcctcccttgtctgtagagctctttgctaggtaaccttgctgcatcctgcttttgaagcttatgaatttgggggatttgaaggcactccatattcatgggatcccaacagagggaaccggggacttagatcgttttggaagtgccagctcacatggtaacattcactttgaaccactgtttgaaacagctggattaagacctaactcacatgtcatacaattcactcatttgaagtacacaattcagtgggtttcagtacattcacagagttgtgcagccatcaccacagtcaattttagaacatttccatcagcccccaaaacaccctgtaccgattagcagtcactcctcaatctccccaaaccacccacatacacctgcagccaaccccagctcttggcaaccagtaagctactttctacctctctaggtgtgcctatgtggacatttcatctaaataaatcgtacagtatgatgtcttttgtgactggcttctttcccttagcatgatgattgcaacgcatttgaaccacttttacgaagtaatcaatttgtgtgtttcatcagttctctttcacattgtttgttttaaaatctgacttcagaacttctccctttataggaaacaaacatgttgtattttgcccatgtggtttcttggaacagaagtgtaatttttttttttttagatggagttttgctctgtcgctcaggctggagtgcagtggcatgatctcagctccctctaacctccgcctcctgggttcaagcaattctcatgcctcggcttcccaagtagctgggattacaggcacctgacactatgcccagctgatttttggtatttttattagagacagggttttgccatattggccaggctggtctcgaactcctgacctcaagtgatccgcccacctcggcctcccaaaatgctgggattacaggcatgagccactgtgcccggccaggaagtgtatttttctgtgtagggtctaacggaacacaggccaaatgtcacaaggggatttggaaaggctgccatcttgacaattatgtccctcctagtccccaaccccactctagtcagaatcttctttttaaaaaatgctttattgagttataattcatatatcatataatttgcccatttagaatatacgattcaatggtttttagtattttcagtttttgcaatcatccccacaattttggaactttttcatcgctctaaaaagaaaccccataactctaccagtcacctcccattcccttctccctccaaaccctggcagccactttctgtctctatagatttgcctatcctgagcatttcatataacagactcatgcaatatgtggttttgtgattggcttatttcattcagcataatgttttcagagttcatcagggtcactgatatatgttgtagcacatatcagtacttcatttctatattatatggggggaaattccattgtatggatataccacatttaaaaatgcattcatcagttgatgaacatttgagtttgttgtgtctgggatccccaagagcactcccaagttcagtgattcactagaaggactcacagaattcagcacacaacatcctcatgactaagatttattacagcaaaagaatacagagcaaaatcacaaagggaaaatgtgcacagagcaaagtccagaggagaccagattcacgcttctaagagtcttctcctatagaggcacacagaacacacttagtcctccaccagagagctgtgaggacacataggaattgttgtctaccacggctttaccatagccttgcacttatagcaaactgcaactgcattgtaggtactgctgattagaaactcactgcccagggtttttatcggaagctggtcacataggcatcctctgccaagcatgtaccaaaactccagactccagaaagaaagcaggtgtttggcataaaccatattatttgtacagtttagacactgcagtcttataatttagggaaaacattttatcaatgaaaggaactttttaccagtcaagttcccagatgccaaccaagggtaatctttgaaagcaggtctttttaaggctagtggtctcagacctgctctgttaactttcttccacaccagattgtttctactttttggttactgtgaacaatattccctttatctggttgagtttggtgagtgtttttattatcgaaaggtttggagttttgtcagatggtttctctgtgtctgtctggatgttttttgtcctttgttctatttatatggtacattacattaactaatgtttggatgttaaaccaaccttgcattcctgcaataaatgcccattgttcatagtgtataatcctttctcttttttttattatacgttaagttttagggtacatgtgcacaacgtgcaggtttgttacatatatatacatgtgccatgttggtgtgctgcacccattaacttgtcatttaacattaggtatatctcctaatgctatccctcccacctccccccaccccacaacaggccccagtgtgtgatgttccccttcctgtgtccatgtgtgctcattgttcaattcccacctatgagtgagaacatgcggtgtttggttttttgtccttgcgatagtttgctgagaatgatggtttccagcttcatccatgaccctacaaaggacatgaattcatcattttttatggctgcatagtattccatggtgtatatgtgccacattttcttaatccagtctatcattgttggacatttgggttggttccaagtctttgctattgtaaatagtgccgcaataaacatacgtgtgtataatcctttctatatgttgctggattcagttttcaatattgctgagcatttttgtatctatacttataagggatataggtctgtagtttacttgtcttatttatctttgtgtgatttttatgtagggtaatattggccttattgaatgatttgggaagtatttcttccacaactggtattaattctttaaatgtttgatagatttcatcagtgaagtcctctggtctcgggcttttgtgtgtgggaaattgttaattactagttctatctgtttattggctatagatttattccgtttccccccccctctttttttttttgttaagtcagtgtcactcatttgtgtctttctaaggatttttaatgctacctcattaatctaatttattaagatacagttgcttatagttgtgtacagttgtttataatccttcatttctgtaaaggcagtggtaattaatatcaataattcattcctgattttaataatttgagtcctctctcctatttctggttaaagttttgtcaattttgttcatctttgcaaagaaccaacttgtagtttgattgattttctctattatttttctactttctatttcatttatttctactctaatctttatgactttcttctgcttaatttggagttaatttgctcgtcttctttcaatttcctaagttggaagtttatgttgttgatttgagatctttctttttttgtaaatacaggactttatggctaaaaattcccctctaagcactgtgttagctgaatctcataagttttaatatgttgtgtttttgttttcactcatctcaaaatatttttttaattttctgtgtaatttcttctttgacacattcgttatttaggagtgtgttttacatttcctcatatttgtgaatttcccacattttcttctgttatttatttctaattatatcctattttggtcagagaaaccataatttatatattttcagtcctttaaaattcattgggtcttattttaaggcctggcctatggtctatactggagaatgtttcctatccacttgagaagaatgtgttattctgctgttttggggtggagtgttctgtatgtgtctgtaggtctagctgatttatcatgttgtttccatcttctgtatgtatgatcttcttcccagttctgccatttgtcagtgcattgaaatctctatttgtattgaattgtctgtgtctcccttcaaatctattcatttaatttcatgtattttgaggctctgttaggtgcatgtgtgtttatagttatatcttcttgatatatttaccattttatcagatatttgctttctaataaagatatgtctcgtatctttattccctattttccactatcagcttctttttgttaaatgaattttccaaatatatcattttgatttccttgtttttgcttttgctctatatttttggatatttttgttagtgtcttactctagtattattatctacctcagatttatagtacattttcataacttatgggaactttactcctatagctgtatttcttccttttctttttgtgctattactatacatattttaccggtagattaatgatttttatcaaatttgggaaactttaagtcattattactttgagtgtttttgtttttgtttttgtttttgtttttttgcttttttctctttctcctctcattctgatattcttattatacgtatgttggtgctgttagtgctgtcttatatttatcaaaggctctgtccatttttaaaagtcttttcttcagactgcgtaatctctatcaatctatctttaagtgaactgattctttcttctgccagctcaagtctactattgagcctatctaatgaattttaaatttcagttattgtatttttcaactcaagaacttcccatttgtgtttttaaaataatttctatcactttattgatattcttcaattgtcatcatacctttaattttttaaacatggtctcctttagttctttgaacataattataatagctacctttgaagtctttgcctgcttagtccaatgtttgggcaccctcagaagctaccttctttttttttttttttcctgtgtatgcattatactttcctgggtttttttgaaaacagatcatttttggtcatatattgcagcaactctgaataatgatattcatgcctcattgagggttattgttgcttgcttgtttgttcagtgatttggctagattcattcagtgaagtccatttcccctgcactgtgtgtgctctcatgttgctcctcagtcttgggcaatgcatagagtcttgctgcctaccagggatgactgtggttttagctgggctccctttgcctgtccccattaagattctggatggtttaccatgattggcgtcatacccagcagttaacctccactacgtgctagctctggttttctcagcaatgccttagtgcatagattgctcctcactttctgatccagttgaagtccagcctttctgcagttgccagatgctgtcagtctttgaagcttgctctgacactaagaggcctcttcttagcttcagaagtctcttttcctggttctgtctttcaaactgctagctggttttaccgcttccattgttgctgacatggaactaccagcttcctcttcattcctcacctccaaagcctccacagttttcaacaatgtccttaggtatgctctgttccaaataaagtcattttcctcagtcagagctggaagctctctgttcttacagaataactctccactctgcgcaggacctctgtgtcactgcatcaaagtggaggtgaggacaatagccttcttcttccatagtgacacacccgctacacaagtggggcactgggttgagagggcagtccctggacttttgggcctgctcctcccagcgtgggacttcttcctacaaacaagctggggtgggagcactcggggcccagtattcttggcgtaccatacctggtacaggctcccagcttacaagcaaaggctggatgcgggacaggagccccagtactcttggccatctctgcctagaatagagcttcttcaacatggagttgggttgggggaaaggggaagctggataagagatgccagaactttcctctccaagttaaattcctaaaccagcagccctgccttgttgccacatctgcccagggtggaatttctgtcacactgagctgggggaattggatagggagagcaggtcatggctcaagcaccacagactctcactatcgagtgagatttagcgcagatcttgtatcaatctatctttctccatttgctatctactctgagcaccatttccaaatactttttttttttttttttttttttgagagggagtcttgctctgtcacccgggctggagtgcagtggtgcgatctcagctcactgcaacctctgccttctcagttcaaacaattctcccacctcagcctcccaagtagctgtgatcacaggtgtgcgccaccacacccagctaatttttgtatttttagtagagacggggtttcgccatgttggccaggctggtctcgaactcctgacctcaagtgatccgcctgcctggtcctgtcagaaggctgggattacaggcgtgagccactgcacccagccttcagagattttagatggttatttataaaatacttttcaccagttaaatcattgttccgctggggagagggtctgctgacctcctcacattgccattccagaaatatcctggccttcatggctagtaactctgatattcagaggggactgggaagaaatgtgggctttggcctggtgccttaactccaagtttacagaaacggaatccagtcccagaactgcagaaaaggctgttagagaagaaagcattgcagggaaagcagaccgagggttgctcagcaatggaataaacccaaaagctgtagcattggttttcaaataggactatcaaaaaagtggcttggatttcgacgagggtttaagacgtttatcctctctactggagacagcttgtagatttgagtacaatataaaccgaaatgttgggaataaagagtaatgtacgtcctcggccctggcttcaagccagtgttttgacacagcatttttgttggtgaaagccgtggacagaggcaggcttctgctcaccgtcttctccagggcccaggggataaggagtgagaagccctttgtggtctctgctagaaaaactctcctgagaagcgaagatttcactaagaaaacagtgaggccatccttttatcccccaggacatttttaaaccactctcagaactattgctaaagtgaaaattctgcagatccgttcccaggtgctcaggagccttcctgatcggaggtgctcctctgaattatgtcctaagtgtcacacgacgcatgctgtggctatttctgtttttctgtttagaaacaagagggtttgtcacggttttatcacatggctgcttctgaatgatatctgccgttcaaatcacatgttaaagattgttttcgaaatccaaagaaactgttttcaaaatccctcctgctcccaccagcttagaccaaccccatcgtacccaattaattccttaataatatttgagtctttcatcttgccaacgtaatacccaaagtgttgagattatctttattagctgctttccaggcgtctgtgcacctttagaaactctcgcagtcggtctgatactgcatccaatcactttctgtccttctacagtttcccgggaaaccgacacacgttgctacttcacatcacacaggaaacttaccaaaaacagactctgcagcatttccattttgtcaataattctaactcactaaaatacatccccattaaaaaataataatgtcatataaataataaacagagcaggcagcaggaggaagaatgacattttaagattgtgctttctcaaagaggcaatgacaggggctgagcaggagccaggaaacccagcttttagcttcagctctgcctgacatttattggtcatgtggctctgggtgtattctcacttctcctccctaaatagcaagaaggaaaagcctcttggagcctcgtgtctctgcttctttctgtacaatggttatgttctgtccgattagctgttattatagaatcacctggctgggtctgtgggcactggccactcagaactcacggcctcccagctttcctccccagaacaaagcactcttcccttccagctgcattgtgaaaaatcccaaggcaagactctgattggctgagctgaagccacatgcccagctattagccaatcacggttttctgagaggcaagctagcctatccatgtggtggggaagaactgcttccttcaaagaaggggttgaggcctagacacaaacaacaggaatcactgcgagttggacgaccaagcactcccaatttgtgtctcccgccaggcccccttcttggcacccacatgtgtcacagacccttctcttgagactacaggacttttagatctttggctgaggaaacatcaggatacatagcaacatatatacaagccgtgaaggaaatggtataaacacgcagatgggtgtgggccatgtgctacactcattctctaagcagttctggacatgctcttggaaatgtggactccagtgagagctcagcagtcccttccgaaccacccctaggccccacccagtgtgaaccctgcttccctacagcctggcagctgcaggaggaggggtgggcaggggtgtacacagggcagagagatgcccaaagggtcaccgagtgggtgcaagacagactaactgaattcgtagcatgccctcccactgaaattgctgatttccccaccatgcagagacgctttccatataagactcacccatataaatagcgtttctctatcttttctacaactggggttgaaggtatctcctccctgctactaaaaggactttatttctgccacctttggctgagaaaccaggctggttttggccccggtctggccccggccagtatgaccctaagaaggtcacttgcatttgtggatgttgattgtttcagacccaagacgaggaaattgaatccagtcaccacttctctcgtttttccccactaggatcccttgtggtagggaagttgaatggggaagacccccgggacctgggaatatagtcaaaagagggtgaaagtcttgaacctcatatttgaccttcagatgataatgaaccctaaccccagtttgtgaaacctagcactaaatttctgtcattcgttcctaaatattctgtgaatttctcgtgagaaaagtgattccttcactatatttcaatacatgtgattttccctaagtttcaggaagtttagattccaagttggtctctaaagaagtaacaaacccaattcaggggctaatcatggagattcctttggcttccttcagatgatctttgttctcttttcttccgttttagtttacgcagagcttaaccttgtaagccacctcaaggcccctagaaaacagatgaagaataaatcttaaacaggccaggtgcaggggctcacacctgtaatctcggcactttgggaggccgaggtgggcaaatcagctgaggtcaggagttcgagaccagcctggccaacacggtgaaaccccatctctactaaaaatacaaaaattagccaggtgtggtggcgggcacctgtaatcccagataggaggctgaggcacgagaatagcttgaacccaggaggcagaggttacagtgagccaagatcgtaccactgcactctagcctgggctacaagagtgaaactctgtctcaaaaataaataaataaatcttaaacagccacaaatacagatccctgatctcttagctgaaacccttgaggctagatatatttaagaatccagtgtttctcaagtttgggagtacatcatatattagggaactgctccagtagggccgggccagcgcttggcgaccaaacacattggtcttcttgtagcagaatatgagaatattcacactgaatagccctacatcagctcacctaggggtaagctgccaggttagctcaagtcagctcagccttcgccaccaaatgagttataaaaaaaccttttgagtttcagagcgttgtgggttttggaatttggaatggagggttgtacacctgttgcgcggatcctagagagaagcctggaactaggaggaagttacaggatctgcggaggtgggtgaacccgaggggttggggagctcaggtgcaggctcccacccagcctctctcgctgagccttgcttctttattcataaagtgggaattgtaacatctgcatcataggatcctcagccagttgcagagatcatgcccgggcattaatctggtatgtaatcggtgttcccgaaaaaggagccactgccacgtttatcatcgtcacccgatgaaggagaagctggctgctctggggtctctgtgtgtgtgggaagatgtgttcatcgtcacctgatggagaagctggctgctccggggtctctgtgtgtgtgggaagatgtgttcatcgtcacctgatggagaagctggctgctccggggcctctgtgtgtgtgggaagatgtgttcatcgtcacctgatggagaagctggctgctccagggcctcggtgtgtgtgggaagatgtgttcatcgtcacctgatggagaagctggctgctccggggcctcggtgtgtgtgggaagatgtgttcatcgtcacctgatggagaagctggctgctccggggcctcggtgtgtgtgggaagttgtgttcatcgtcacctgatggagaagctggctgctccggggtctctgtgtgtgtgggaagatgtgttcatcgtcacctgatggagaagctggctgctccggggtctctgtgtgtgggaagatgtgttcatcgtcacctgatggagaagctggctgctccggggcctctgtgtgtgtgggaagatgtgttcatcgtcacctgatggagaagctggctgctccggggtctctgggtgtgtgggaagatgtgttcatcgtcacctgatagggaagctggctgctccagggtctctgcgtgtgtgggaggatgtgttcatcgtcacctgatggagaagctggctgctccggggtctctgtgtgtgtgggaagatgtgttcatcgtcacctgatggagaagctggctgctccggggtctctgcatgtgtgggaggatgtgttcatcgtcacctgatggagaagctggctgctccggggtctcggtgtgtgtgggaagatgtgtcttacgtctgcaattctcctaaatgcagaggagccacagatggattcagctgttctgtgtattgtaccataagccaaacagtttatacttaatgttcggagaagtcccaaatctgtgactcgctgttagtttcatgtaaatattccagtttgaggtagattttcagcctgtgtccccaaatcccaggaacctctggctccctgctacgcctccatggggtttctgcacagcctggaggctgaccactctcacagggctccgggacagatccaagtccctaggtgccggacggtgtcggctcatggatcagagcttcctgcccgggtgctgatgtgggtaattcactctgactctcagatgagggagcagctggcaggaacatcactcaccgcacccagggacgcttttgttttcctgggtctcagtgtggacctcctgcaaaattaggggagctggcaactctcccatcccctgcccacccccgcctccagctgcaaggacgcagctcacacaccctggggaaaccggattggcagttttccttctagagtgtttacttctgaaagagctgctgtggctggcaatggggcccacatctggggccacagccgtctgtcttaacacccacaaggcgcagctcctagcctggccgctgatgggaatcctcagagagcctgtaaaagaatgcacattccccggcctccgacagacccacagagtcaggatagctggagccactcccaggaatctgctgcctcgatacacagctgatgatcctcagatggcatttcaaggccgctcactcttttaccccctccccagttcccttgataccctctggggagaggaaaaggtcaggtctgcctgacccctgtgagagacgggggccctgggaagcgtcttagcgttagttccgcagcagcgccttggtctctgtgccaccaggtggatcccctaggagcctgggaagctgttaggacgcacaggtgagggtcccaggatgcttccatgcatcgggaggatgtggcacttatcagcaaaaccgagaaacctccaccttcttaggggaaaaaaaaatcaatttcaccctctgctttctcctttttttttttttttttttttttttttttgagatggagtctggctctgtcacccaggctggagtgcagtggcgagatctcggctcactgcaacctcaagaatcccttgaacccgggttcaagggattctcctgcctcagcctcccaagtagctggtattacaggcacccaccaccatgcccagctaatttttgtatttttagcagagacaggtttcaccgtgttggacaggctggtctcgaactcctgacctcaggtgatctgccgacctcaggtgatccgctcgcctcagccacccaaagtccactttctcctttaacggtccttccaatgacttcacatcaaaccgaaagaccataaaatagaggtttgctttcagaaaatgaacctagaaaacatgcagggtccatgttcttaatggaagctgctgatttattttataaaaaggaaaaaaaaaagcctcaaagggactgatcttcaaacatcagtgggaggcctcaggccacttttccgtgtgtttgaggggccaggccattcagtacctggccggggagacatattagacaccctggcttattcaggcagcttcatttctccgtcccctccccaccctcggaggtctctgtggatgtgatgtcacacgatcacttgcaaggggaggatgcaccccccaatcctctcccctcatcacctcccccatcccctcccttctacttaatcacaccccaccccctcccctcccctctacctcatcacctccaccccctctcctcccctcccttctacctcatcaccccctacccctcccctcccctctacctaatcacctccccaccccctcccctcccttctacctcatcacccccaccccctctcctcccctcccctctacctcatcaccccccaccccctcccctcccttctacctcatcacccaccacccccttccctccccgccacctcatcaccccccacacccaccctcccctctacctcatcacctccccacccctcacctccacctcatcaccccccaccccctcccctcccctcccttctacctcatcaccccccaccccttccctcccctccacctcatcacccccacacccaccctccctgctacctcatcacccccccaccccctccttcccctctacctcatcaccttgcccacccgcttccctgtacctggtcacctccagaatccttttgttttggtctgtagcagcccacatcttagtctcaggcaagccaaagacccagatcttccccacccctggggctcttctatgttctgccctgtaggggcaggcagagtcccctggggcctgtgtggggaggctgcgtagacctctgctgggtggggaggccacctagatctttgctggggtgggaaggctgtgtagacctctcctgagtggggaggccgcgtagacctctcttgagtgagggagtccgcgtagatctctcctgagtggggaggccacgtagacctctcctgagtggggaggccgcgtagacgcctcctgagtggggaggccgcgtagacctctcctgagtgagggaggccgcgtagacctctcctgagtggggaggccgcgtagacctctcctgagtggggaggccgcgtagacgtctcctgagtggggaggccgcgtagacctctcctgagtgagggaggccgcgtagacctctcctgagtgagggaggccgcgtagacctctcctgagtggggaggccgcgtagacctctcctgagtggggaggccgcgtagacgtctcctgagtggggaggccgcgtagacctctcctgagtgagggaggccgcgtagacctctcctgagtggggaggccgcgtagacctctcctgagtggggaggccgcgtagacctctcctgagtgagggaggccgcgtagacctctcctgagtggggaggccgcgtagacctctcctgagtggggaggccgcgtagacctctcctgagtgagggaggccgcgtagacctctcctgagtggggaggccgcgtagacctctcctgagtgggggaggccgcgtagacctctcctgagtgggggaggccgcgtagacctctcctgagtggggaggccgcgtagacctctcctgagtgagggtggccgcgtagaactctcctgagtgggggaggccgcgtagacctctcctgagtgggggaggccgcgtagacctctcctgagtggggaggccgcgtagacctctcctgagtggggaggccgcgtagacctctcctgagtggggaggccgtgtagacctctcctgagtgagggaggccgcgtagatctctcctgagtgaggaggccgtgtagatctctcctgagtgagggaggccgtgtggacctctcctggggtaaggaaggccgcgtggacctctcctggggtaaggaaggccgcgtggacctctcctgagtgagggaggccgcgtggacctctcctgagtgagggaggccgcgtggacctctcctgagtgagggaggccgcgtggacctctcctgagtgagggaggccgcgtggacctctcctgagtggggaggccgcgtggacctctcctgagtgagggaagccgtgtggacctctcctggggtaaggaaggccgtgtagacctctcctgagtgagggaggctgcgtagatctctcctgagtggggaggcggtgtggacctctcctggggtaaggaaggccgtgtagacctctcctgagtgagggaggccgtgtagacctctcctggggtgaggagaccatgtagattgctcctgagtggggaggctgcatagacctctcctgggtggaggcccagctcttctcggaaacctggtacagagtgaggggctggatgcagctgagaaaatgcagtgtcggtcacacctggatcagggagggggacctgggggctgcctgctctcctgtgtggagggtgggagggcctggcattgggttggggtggggagagggctggagaccgcgacacacgcccctggggaggtgcccccaccgccaggcctcctgcccagcacgctccgggccctgcgccctgccctgcactcacaccttctctcccgctccccgcaggccacggactctgactacgaggacgcgctgcccaagcactccttcgtgaaccactacatgagcgaccccacctactacaactcatggaagcgcagggcccagggccgcgcacctgcgccgcacaggtacgaggcggtggcgggctccgaggcgggcgcgcagctgcacccggtcatcaccacgcagagcgcgggcggcgtctacacccccgctggccccggcgcgcgaactccgctcaccggcttctcctccttcgtgtgagcaaagcgccgcgcctccctcagggcggaacggaggcaactttccggagtctatttttgttaagacaatcaactccaataactgagctgaagtttttgtttaaaaagaaaaaaatctgataagtgatgattttacctacttgtggacactagatttcaattaggaaggtttttttaaacggctttttgtaacttcgctgcaggaagcaggtttgtttctttttcttttctttttaagagaaggtgtatttcactggtgcaatggcttggcacctccggggcctgggaggacctcagacctccccagccctgggtttctccgtcttcaagaccaactaggaagggtcaagcggggagagggagtggagggtcaggtgagatctcagagctgccccggccggcccccgtctctttctacctcctcttccagagaaccagcggctcacacccttctcaacgcaggacatcctcggcggctcctggggtttgaagagcaaacgtttttccctgggctcagtgcgttttgtcccaacttcatctgtttctgaaatgttctcacttggcagtgtctagtcaaggagtcggctttcaggttcctgacggccaggcagggatgctaaggtgtggctcagccgtcactgtctgtgtcactgcagtggtgcggtcctcaggcttttctgcctgtctttcccccttccttctcacctgacagcgagggagagggaagcctcttagggctggaagccaccacgctggccctctccttccccgaacacagcacacggtcaactccgcgggacacgaggacacgggacggcgtctccagaattgcttgttacgtaggaagcgtgcattgttaaccagagtatttttaaaatctttttatctttttttaaactatgtcacatgaaatgaatgcgtctttgctgtctccaggtgcctttttattaattgttcagctttgtacatgggaaagatgaaaagcaacagtgtctgcaaataaagcaaaacagctctgagaacacacgctcccgactcgcctcgtgcacaccaggccgtcccctccctctgtcctggcttctgctggctgctcgcagcagccaccgcttctccaccactggcgctgctgctgccccctctcccagtccgaggccagcttttagccttaacaggttttttggaaatgtttcttttttttatttaaaattgtcattgtttggtttaaatttttcagctagatgaaaagagtatgaactactttggaaaacttaacagctcagagatggccatgcctccagcccctcacgtcatctttgcaacagacgactgggctgccatggtccacccctcagcccgggtcccgggtctggatggaacgggagcactgctggtgcccactggcgtgtgtgccccgggtccctgtaagtgccccctcaccagcagcagcgtgacacacacaagactcaagaccaccctgtcagtgccccccagtgcacggcaaacgggcaggtgccgttcccccagtgacctgagggtaggggacaactgagcagtatctgaccagtgccacccaggagccagtctcctggccacatgcagaaagtgtggcccctgcttacctagatgttttgtgcacctccatgggcagagggtgtggatattgcctggattctgtgctgtcagcgttgctgagtatggccccaggagaccaaggagagttttgtataggctggaaaaccccttttcagtctttccaaaattagagggtatggcaagtttccttttttctctcctcccttccttcccctccttcctttcctttacccctcctttccttccttcctcccttcctctcttctttcctccctccctccctccttccctcccttccttcctctctttcctccttccttccctcccttctttccctccctcccttcctctctcccctattccttcttccttttctcctcctttttctgagtggagggggaaatattctaaaccaaaaatcctagatgctctgcccaaagccacttctgcatgagaatcgcaacccacagttccccggatgagactcaccacagtggacagtgccacctccttcccctcggccccggagagggcgaagtgggcgggaagccaggatgtgagcactggaatttcttggaagagaagcgataaatggagaccatggccagcgctgctttctgtgcactctgatgactgctctctgcagccatgaggatgtggctttacatgccagggagagtgttgagacgtcttaggttgaggatgagcagattcgagatatgtttgttgctctcgggttttcgatacaacatcatgacacttctgtttcaagctcatgttttccgtctcccctccactcttagtaaaccttgatctgtacggagcggcctgtccgaggctacgccggcctcctggctgctgctggactgtgcttaggacagcgcccatgcctcggagggactctgtcccatgagaaccacctgtgcaaaggaacagagctggatgtttccaggtagattttggcctcccagagcaatgcggcatttgagaagcaacagttcctaactccttatcttcagggaaggaaaagaaaatcacagcctaggaagatggaggttggattttaatctcggttttaaaaagaggacaaacaaaatgtctctaagccaggctagatggaatgtgctcccgctctctcctgccgtgctgaaagtcatgccttgcggatgcctcatgacagcagtggctgagtctccccacccacccccaacgtggctcatttcagattgcttcggccccaccctgcaaggatgtggtcacggagtggccaggaggctccgtctgagccacagggatgggtgtgcagagctccctcctcctggggtgccagggcagagattccaggcaggtgagcccagagagagctgccaggccacaccccctcggcctcctgcacggccaccttctgggtgaatcggtccagcccaagcccctctccccagcctcgccttcagcctctctcccagcctgcttttataaggcgcacttcactcaatgctgtagccaaaaaacgaggggccccagggagaggggacccagatggccacacacggaacgcgcctccacagccccgggaggtggctcactctgtacaggtcttcggaggccgtgtttgtatctaactgtgactgggctgaagcatgatgtttgcctaatggttcgtagcatggtttttatttcttacgcattcttggcacacagtgtagctatcctcctgacgagcaacccgtctgcgtacctaagtgtggctccccgtgggtcagcgtcctggtagcatggatccagtctgaaaggtgaggacaacgtggaaactcatgagctgagcctgcccgctgggacacgtctccttcccgcgtcaccttctggtttagggagccgtcaggtccctaaacgttccctacaactttttctgaaattgtgcagaaaaacagatctcattaaaagaaaaaaagaaacaacttgtaggaagacagagaggtgctatgggtacaatttttaataaaaacattattttgttccttaaa

SEQ ID NO: 144 - DNA, 38271 bp, Homo sapiens
gggtgcaggaggaggagacggcatccagtacagaggggctggacttggacccctgcagcaggtactcggagcaaatggtgagatcagaagggggatgatgtcattccttcgaaggaatgaattaaacgtgcttcctcgtgtgtctgattgacagccctgcacaggagaagcggcatataaagccgcgctgcccgggagccgctcggccacgtccaccggagcatcctgcactgcagggccggtctctcgctccagcagagcctgcgcctttctgactcggtccggaacactgaaaccagtcatcactgcatctttttggcaaaccaggtacgattatttcttaaactcaatcaattatttaatggtgctctaattttaagaaattagagttctcgaactctaagaagcggagaagaaaaaggagcaatttcgattcttaacttaaggtgggtggtgtatctattaacactaaatggcaagtgtttcttcacgtggtgtttctactgcccgcttgaagagcaaggcacgtggccgctcctcagcttttcctccgtggctgtgctttcaccagccgggcaccccttcctctctgagggttgtggctgctgctatttcaatgtatatacctgcctgggaacccgggtaaacgctttatgttttcagtttccgaagaagaagattccacatgagagtttgttattgaggagagaattagaaacaactcccggaatatctgaaaagtaactggagattagagagagactctgattgttaacatcattattagtagattagagagagactctgatcgttaacattattagtagattaaagagagactctgattgttaacattattagtagattaaagagagactctgattgttaacattattagcagctgaaaagtggttttgaacataactagagagtatttgtggtaagtctatggaaaatcctgtgactgccgggacacacagcgacttttaacagtcttggggcagtttgcatatgaaaagcgagctggcaggttgcctggctaccacttaaggaaggtgggtttggctgcccaggactgggagctgagcacccaggagtctggtgtttaatcagactgctgttggtggtggacggccggtaaacaattagctctctgcaaagctatcttttactttgattgttcatacgaaaagagttttaaaagacctttgcaaattcaaactacattctgctgcagacaggcaccgaaatctttcttttggaaaaacacaagcataaacgtggatgtgtggcgtgcagaggctggggcaggggtgagcggcactggctcatccgtggctccatccatgcatgcccggtgtccctggatgggctgaggccaggtagcctggctgctcatccttcctgtgggatggagcctcactgtcctttgacaatccgcagcaggggatgctttgttagcctcctgctcttgtaagaatctacctcaaggcagagacagtaggatctggtttcgtcaaaggagtttgatttagtttttctaacctgtccttatgaagctgggcatccagaactttcgcatttaccatcctgttcttggctggcctctgcagggccagccccacacagctgtccttaggggactgcgacgtacccggcagtgtgggctgatgaggtggggaggtgggaagagcctgccaaggctgtacctgagctgtgtattctaacaccgttctgtggtgcttactgcatgcaggtactgttctaagctcatggccaagtgttcgctcctgtcattaaaccctcttaagagctccatagaaaggccctatcagcaccaccattattactgcagctgcctcgggcagttagagtagaaagcgccccagacccagaggcacattctgctccggtaacccatgcctgtggctcgctgggctaagtcagcccctggtgaagtttcatttgccgaattcatctctcatgacaacccgatgaggtgggcattttacatgacgctacgtttcattctacggatgaggaaactgagacagagaagttaagtaagtttccctaggttgcacagctggtgctcagcattgctcagcctggtgctgactccggccgcaggccgtgctgcttccggagccaggacagatgaaacaatcaccaaggacccctggggcggcactggggggagcagatggtttggggggggggtcccagcagcagatgggtggggggtctgcaggtgctgccaagcatttctcttcttctgaggaatgtttctctattcctggaaggtgaggatttccaggttaccaaatgttgtttctggagagggagagtccttggattaacaatgagaagttaacggcctttgatattctaaatatgggaagaattggggtctcagtcttcccttcaacctagagcagggtgtgaccaattgctggaagggacctggggagccctgggaccctcaggctcatgctcgcccggaagaggagaagctgagatccacagggttaatcgcccagccgggctttggaccacatctcctgacttcggggccagcctccactgagctgtgccaacttaaaatccccaagaatggaaaaacaggcctgcaggaaaataaagaggcagggtcaaaatgatggctaagtcaagtgttctgttgttttgtaagtataattcaccaaattaagtttatttgtaacttttttttacagttgatattcattctatttaattaggttatgcataactgttttttgctggatatttacacaaaatgcgttcacagattatttttgtcaggctggatatttttctaaattcaaactttctacatctaagtcctgtctacgagtcgtatgaacagaattactccaggcaagcgctgaacttgcccatcttccatttgctcatctgtaaaatgaggacaattagagcagcacatacctcccaggctattatgaagatgaaataataggaatatttagaacgtgatgtgcagtgcttgccggcaaatgctagctcaacaaatcttatagttagaagaatcctgcttgaagagtaaatttcctccttcgctctcagtttgccacaaatccagttggtgctgagttttatatgcaaactgttattcaatggtcatgtgagtcactgggccagtctcgctcacaggcagggttgcagctgtggactcatcactaacaagggtttcctgtattcccaggagctcagctgcaggaggcaggatggtctggaggctggtcctgctggctctgtgggtgtggcccagcacgcaaggtgagtgtcctcagagcctgtggtctctctctggcttgtgagatatggcttagctgcaaggggagagatgacaaaataaagtgtgtggttggacaatcttacccgtgaggaccttctagctcctttataaatcaaatagtaacttacttctgagccaatatgacatgagataatttatctttggaaaattcaggtgttagagaaaaatgcaattccacctagagttgcacagtttatccttttttctatagaggatgttcacaacactgcaagtatttggtgtttgttgaattctttttgctccactttcttcctcctttaaatattttcccatgtgtttacttttctacagtatgatttttaatgaccacataatatttcatcacagataaagcctgatctttttcaatcaattcccacttagattggtttattttcattagcataaatgatgacacaaaaaatattgacgtggataaatcttaagtagcatttgtgattatatcctttggataggttacaaaattagaattgctgaatcaaagcttttaattcttgccaagtaactctatggaaagtggtccattgcccacttctgtcagcaaccctgtgtattatcctgttctaatttgctaaatattagatgaaaaggaaggctttggctaaactttctgttcagtgtattacttttttttttttttctgggacggagtcctgctctgtcacccaggctggagtgcagtggcgtgatctgggctcactgcaagctctgcctcccgggttcacgccattctcctgcctcagcctcccgagtagctgggactacaagcgcccacaaccatgcctggctaattttttgtatttttagtagagacggggtttcaccacgttagccatgatggtctccgtctcctgacctcatgatccacccacctcggcctcccaaagtgctgggattacaggtgtgagccaccgcgcctggctttgaattatttaaactattatgattttcgtgagatctgatcacttttcttgccaatagcttaggtggtgacttaaaaccatttgtttctgtacttgatactgaccactctttcagatccttacccacagggtgcattaagagttggagaatacatttttacaaaataacaacctgctgacataactggttttaggcagttgatctcaacaagaaagcaacatacgatttagccgctttctgacactctatcaatagcaaggctaaagatccatgtctttcccagtttattcatttatttggttttttcctgagcaatcaactggtagacaggatggctgcttttcagcctcagatctgagatggaagagccagacagagtgacctgggacatgtgccaggatgtcaagcgaggccgggattccctcaccaagaaggtcgggctatgcaaagggccagctgaacggacagggcgctgcctgtctccaccgatttaccttctggcacacgctcctcgaccagccaggggcagaaactgaccccacagacccgcagctgcgttgggcccacactctgagtagcggcactggcacggaggatagtggcttttcatcagaggtggctccaggattcccataaaaaagggagagaagctgcgggatattgggaggcctcgttaatttccttacacgcgaggttctggtttgtcaccctgggtcaggccaacctcgccctcttcccctacgtcacccttctccactgcggttccctttgcagctggtcaccaggacaaagacacgaccttcgaccttttcagtatcagcaacatcaaccgcaagaccattggcgccaagcagttccgcgggcccgaccccggcgtgccggcttaccgcttcgtgcgctttgactacatcccaccggtgaacgcagatgacctcagcaagatcaccaagatcatgcggcagaaggagggcttcttcctcacggcccagctcaagcaggacggcaagtccaggggcacgctgttggctctggagggccccggtctctcccagaggcagttcgagatcgtctccaacggccccgcggacacgctggatctcacctactggattgacggcacccggcatgtggtctccctggaggacgtcggcctggctgactcgcagtggaagaacgtcaccgtgcaggtggctggcgagacctacagcttgcacgtgggctgcgacctcatagacagcttcgctctggacgagcccttctacgagcacctgcaggcggaaaagagccggatgtacgtggccaaaggctctgccagagagagtcacttcagggtacgctctgcagggaggtggccgccgtgagggaggaaagagcttagctgggaactgatctgctaatgcgtctggtgatgcgatgcttgagcaggcagagcctggccttagagaagcacactgcacatcccggcatgtgctcacacacatgcgtgcacacaccacatgcacatgcacacactgcccaccacacgcagccacaggcatgtgcacacatgcacacacaccacacacacacacaaacacacatgctcacaaacacatgaacacacatccaaagacatatacacaaacactgcatatgcactcacactcgcatatgtatatacatcacacatgtacacacaccacgcaacacacacacacagacacgcacacacacacctcaccacatacacatgcatgtgaacacaccctcacatatgcatgcccatgtgcacacaaacaccatacatgggcacgcacatgcagacgcacataaacaccattcatacactcatgtgcacacatgcacaccacacagacatacatgtgaacacacacatgcacacacgtgcacacaccctacgtgggcacccatgcacatacacaaataaacaccatgcatgcactcacattcacagacgtgtgcacataccacacatgcacacacaccacacacatacatgtgaacacactcatgcatgcacatgtgcacacaaccatatgtaagcacttatacatgtgtgcacaaaacaggtgtgcacacaccacccacagccatgcaatgcacgcacaccacacacatgtgaacacacacatacacacgtgcacaaaagtaccatacacagtcacacacatcacatttacatacctacacaaacaccatacatacactcacacatcccccacacataaacacatgaacatcatatagatgcatacacagaaccacacatgtacacacacatacacatgcacaaatgcacacatactcatacacacgtatacatacacacaaacacctcatgcaaactcatgcatgcacatacatccatcacacatgtgtatacaaacaggcacacgtgcacacacaatgcatgcagagccacaggcagttgtcagcacatacgtactttcacacaggcactcaccctttcacatgcaaacaccacatacaagcgcacacacacacaacgcacgcctttctaaaccacgattaatcagagagggctgccccaggtgtgcttccctaactgcactaattatcgtcagttgagattgaggctggtttgatgatcaaggaatcaaccctattcaaatgtttctagcaatcccagacttttttgatcacaaccaaaaccactcctaaatgtttgctttagtagcgaaatgatgggagagcaaagtagcaggtgcccttttccaagggaaagggctagtgatttatgagggaatggtttcatgtccattttggttaaaatatgtttggaaatgaatcttaaactgcaggtctttagaatcacaatggtgtatggtacattgctccctcccggacgtgtagggccttggaaataagtacatggttaaactcagtaatttgagtaaaaggtctagagatgcatagcttgttgttgagtcaatttctcatgggtgtccaggagttccataccatataggactggcccagccccgtcataactcagctgcggaaggcgctcctgcaggcccagggtctgtgtctctgagaggaccagtgggactctgtgagcctctttgccaaatgcagaaactcgctaatcatgagtgacttgcaaggaacgaatggccttgaacgtccatgggaacatgcccagaacacacagcaggccacacctctccaagggccatctcactcttatttatgaaacatttccttcttctaggtagatttcttacattacacttccatttcttgtgtcatgcttaaaaacaaaatttcaaaagtactatatacagaaaaactgattataaagagattgcaaacctgctacgtagaaggaaatactctcactacttgaagattccaacttgtatttttagaatgtcagttagcttggcatcaaacattggatgtttatctgttgctctatttttctgcttgtgtatacttacagggtttgcttcagaacgtccacctagtgtttgaaaactctgtggaagatattctaagcaagaagggttgccagcaaggccagggaggtaggtgtgttgtgaaaaatgcattttatatactggcttggatggatttctattgtgacatggtgtatgtgtgtgtgtgtatgtgtgtgcattcatgcttgtaaaaatttaagtaaaaatatttgggtaactaccactattgtctttgagtgacttagctggtcaacttagacatgttgatatctgaaaataataaattgattaaacagttaattttaagtagattttaatcatccaaataattttattatagaagacaaaatataaatagctggtgctttaatatgagttgaaatatagacaacttttccagtatattaatgtgtgatgcttgtctgcctaaggaaagtcatagatatttgtcgaacttgacttacagaagttttcttttttttttttttttttgagccagagtctcactctgtcacccaggctggagtgcagtggtgcgatctgggctcactgcaagctctgcctcctgggttcacgccactcttctgcctcagcctcctgagtagctgggactacaggcacccgccaccacacccagctaattttttgtatttttagtagagatggggtttcagcgtgttagccaagatggtctcgatctcctgacctcgtgatctgcccaccttggcctcccaaagtgctgggattacaggtgtgagccaccacgcccggcctagaagttttcttatactgttcatagttgttgactccatcatatgatggaaatctatgctacttaaatcattgacagatgatctcatcttttctgttagttacaattgtgaatcatatttccaagcacactttccaatattttcttgagcatttaattctgaaggtcactatgacaggttcattaaatgccgtacatcatctaatcttcagaatgactacgtgagatgggcactttcactttcttcattttacaaagatgaaggctggcacccaagggagtgctgtgtggctgccatgttgagctccccagtgagcagggagcagggctgctgcctgggtctgtctgacagcctcaaagcggagctcacgtctgccacacggtgtggccgtgtgcacacgaaggccaggccatttcaattccaaattatgacaagcgtaaactgttatgtcatgaatctatacatcaggaatatgtgagatttggtatctttggtgcacaatgactctgtgatcccaccgcctacttcagaaccggggtgcgtagcccactcttcagttacactttgcaggtccgggtccttgtgcacgtcctgtgaggaaggagaacaaggagacatttgatcatcaatgcagggagaagggtgttctaagaccaaccctcattccagctccaactgtcacccccaccacgaccctcactgtgcctgttacctgaggggtgatttgcagcacaggcagagttatcttggctccagcactctgcgtgccagggcctcagcttcatgaggcagtgctcttctgggggttcctggggtgcagttggctgtggggcttttgggtactttttgttgcaataatgttttttcagtctgatatatttatatgtatacgtgtgtgtgtgtgtgtgtgcgtgcgtgtgtattttcactaatatagaaaaatattgtttttataaacaaaacatatatgcaaatattctttgtatgaaagaaaatatacccttcgcggtgttcctaatcacatgtttgtactataatttcacgtgggttcagttaaactagagctaaggttgtccatggcatgttgagtcagttgtcataatggtcagtgagtaaaactaacctactatgacaaacgtgacttacacctctatgtgagcaaacaccttgtgtgtgtgtgtgtgtgtgtgtgtgtgttaccagcatacaccctagtaggtgcagcctccttcagcaggtatttcctaggctcacaggtacaagtcaataatccctggaactatcaaaagcaaacctttaaaacttatgggaaactcttagatcttccaaaaaaaaaaaaaaaaaaacacagagaaatctagatctgttatctccagatgtgtagaataagtatggatctatatacatatatctaccggaccatatgtggcaatcacccatgagttagtctactcaaagccaggtggatgccaatgtcccatttggagatctttgccaacacaacaaagacttcttcttcactggttatgtcagacttaaggaaaattggtcttatacaaacagctagttcatggattggttcttggtaatgacatccccttttccactgtttgttaaaagtgagagtaaccttgtgaagaggctgagccattattattttacaactgagaatactggcagaagcctggagaaatgcaagttagctggaaggttttactaccaggtaaaactacattcctgtcagagccagagcagaagcaaagatatatgcggtcttttgtttaacttttagaggaatgaaaaacaaataccctaggttagttaaagattagtgtgctgggtaaaatccactcagggtggtttctttgtctctattaatgtgttgatattgacctgattgtacatggttatgggcaacatgaatccgaggggaagcttctgagcttagtatgaattgcagcacagtttataaccaagtgattaaaaactcaatcacggaatgcctgacagcgctgtaaaatgtctaagtctttcctcaataatggactgtccgagagaagtcaggcatttcaaagatgggatcttcacccctgagagggagcagggtcctacatgggggtgaggtgagctccggcctagagcctgggccctgactgcaactgcgcaggccccgctgacctgaggactggaccccgcctccgtccctgactcgcctcaggtcaatttgtaaattacatgccatacccacccaggtcccacgatctagggcttcagagggagtggtgggaatgtggaaaggtgggagtggtgggaaggtgggagaggtgggaaggtgggagaggtgggaatgtgggaaggtgggaaggtgggagcggtgggaaggtgggaaggtaggagtggtgggaaggtgggaaggtgggagcagtgggaaggtgggaaggtgggagtggtgggaaggtgggaaggtgggagcggtgggaaggtgggaaggtgggaatgtgggaaggtgggaaggtgcgaatgtgggaaggtgggaaggtgggagcagtgggaaggtgggaaggtgggaaggtgggaaggtgggagtggtgggaaggtgggaagatgggagcactgggaaggtgggagtggtgggaaggtgggaaggtgggaaggtgggagcagtgggaaggtgggaaggtgggaaggtgggagtggtgggaaggtgggaaggtgggagtggtgggaaggtgggaagatgggaagatgggaaggtgggaaggtgggagcggtgggaaggtgggaaggtgggaaggtgggagtggtgggaaggtgggaagatgggaaggtgggaaggtgggagtggtgggaaggtgggagtggtgggaaggtgggagtggtgggaaggtgggagcggtgggaaggtgggaatgtgggaaggtgggaatttgggggaaggtgggaagttaggagcagtgggaaggtgggaaggccaggaggagcaaggcacagtctcaaggggactggctgtttgagcaagaggatagtgaattttctttaaagcagagcaaggagccataagaaagggtgtttggggatgaaaaaaaaaggatgaagagtcgagaggagccgtcagaacatatgggggatgtgttcaagaagcagatttgtggtcggaagctttgcaaagaggggacctgggtctgagtgacatgcgtggccactggtgctcctgcgtttggactgtgcaggcctctcctatgctgatgcgtctccccactcctgagctaatttctgctctgctccttctgtgacatgtggcagcgtgggaaatagccactgtcccctgtccctgctgttcctggtgtcacccagcaccaggccactctgggagccagggcagatggtcctccctgtggtcctggcctctgctgctggcccagtcctccgccttgtgtctcccagcaccaggccgctccgggagccagggcgggtcatcctccctctgttcccagcccctgctgctggccccgtcctctgtgatgctcacggcccttctacgcttgccctcagctgagatcaacgccatcagtgagaacacagagacgctgcgcctgggtccgcatgtcaccaccgagtacgtgggccccagctcggagaggaggcccgaggtgtgcgaacgctcgtgcgaggagctgggaaacatggtccaggagctctcggggctccacgtcctcgtgaaccagctcagcgagaacctcaagagagtggtgggtactcacgcaggggccgcgggggtcatagggcatgggcagctccgccgctggcccatctcagcaggtatcaacattccctggcttggcagtgcctcatgctcgatgtaaaaacccacagttcacaggggaggtgtctgccgggctcctcaggatccttgctcaatattcagcattgttagagggaagttgggtagatcttgggaagtattcccaaggaaaacagtcctgggcacagtctccaaaataaattcttaattttgggaaatttacctccttggtaaatctgtaggtatgagtgtacacacacacacacacatacacacacacatacacacacatacacacacacacacacctgcagaggaaaataattttatttcaaggactgcatgttggcatagctgaagaggcaggacgggaagttcctgtgaggctggcaggagtgaaatgggtttgagcggcacagcgcggccaggaagagagagcgatgcctgcggggctcaggacgggcagctcgcagtttagagaaagggactgaacataatgaggtgctccgggccacggtgccccacaacatacacatggctaaccagggtgcagtgatgctgactgtcactcgtacccagagggcatgaagtaaatgatgccaggagatggagcccagggcagggagggcggcaggggcaggagtccggggcagggagggcggcgagggcaggagcctggggcagggagggggtcgatggcaggagaccggggcagggagggtggcgagggcaggagcttggctgtatccctgcctgtcgttatggctgctgcctggggacctagttcccaccccagtcccacctggcgtccccagtcgaaggagccccagcgttgctctgcactggtccaggtgtgatgtgagccacgcgatttccgctctccaggaaggcaggtggatggggagccccagaagcccaggcagtgacgaagctgtggctcagaaagccccgtgaggatggaggacaacttccggaacttccacccagggatgagtcaagtcttacttgactttagagctttttaatgaaggaggaactttgtttttcatccacaagcatgatgactaaatatgtagtattattgtctacacttaaatgtttcacttgattttccagtcgaatgataaccagtttctctgggagctcattggtggccctcctaagacaaggaacatgtcagcttgctggcaggatggccggttctttgcggaaaatgaaacgtgggtggtggacagctgcaccacgtgtacctgcaaggtgaggccccagaacacggctcttgggggaagaggccaccatcggacacttggcagaacctgactgcctggaaatgccagcgttcagtgctgatgtgtgaaaccggttcagctatgtgaggaaatttcagtgtaagaaacacagaagggccaggaaccgtatttaggacttgaatcaacctctttgtttgcacataaagaaccagagcccagagagggggagcaacctggccagcgtccccagttggttagaaacaggaggaacagagaagccagacatggccctagactctgcatttaattccatccggttccaacagagcctgaggctcagcagaaacgtttgggggaaatacaagccactgcctgaagtcttacagacagacaatttagcttttaatgttactctatttctgctgacaatggcctcagcattaccttagataacaggagttcctgctgcccgtcttttcttccctccttccaggaagcttggagctctctgttgcatccttgctgctcagtgaagggagaaaggaatggaatggatgcaaagagccatctgggggccctgttcttgttaggctgtcagcactaatgggagaaaaagatgcccttattttcacatctctgtaatgtatggtccgtaggatggaaaacattcagccattctgtcgaccccttctagtctcagcccttgtaccagcgtcccctccttttaaatgagtgttccatgcatgcctttcttcacttgtagaaatttaaaaccatttgccaccaaatcacctgcccgcctgcaacctgcgccagtccatcctttgtggaaggcgaatgctgcccttcctgcctccactgtgagtatcgccagccggcaagcgcatcctgcatttttaggaattccatgcttgtttgtttatttattcattggttggttttggcagagaagagtgaggttcagccccctgagtacaggtgagagaatcagagggccaccccaggccactggtcatccactgaggactgactcatggctagaaaggagtgtggaagccctgggaacgcgggggtgggaaggccagtcctgatgcttctcagacgaggaagctgagcccagtggtcacgcaggtgagcccagagcaggccccgatggagccccagctgagagtcagagaacacacgtagatctgtgactgtgttatggcagcaagtgatcactgtacacacactcctggaaaaaacaatagaaaatcagacaaacaaaaaccaaagactgttatccgaagaatatgttctaagggatagaaatacattctaaggaacagaacctgagatggagaggaaccacgtgtgggcaccctgggggttcctgggccaccctggaaactcagtgcacgttcagagactgagttggccccaacgctgccctcaggtctctgtgctgcctcccacccctgccccgagttcccttcccaagttagctctgctgaccccacccagagctcctgagccatccgtggctccccagtgccgtgccgttggcaaggtgcttcaggtctacaccccaagttgctgctgcactaagatcaggcaacgcttctcccaaactaaactagtcaccatcccccaaacattcccagaatgtccctgtggccccagagctgtgtcatcctcagggcaccttacctctgatgtggacagagaatgaagggactcagagctcacgctctgccactctgtgattttgaataaaatgggatttttctgagtttcaaatttattgcctgtaacatgcagaaaatgtatcccctatacagttagtcttataattaaaaccaacaattcaatatgcgtaaaagtgcctgttaggtattcacaaagtcagaatgctcctggcaaagcataaaaatataatcttgataatcaaagggcccacattagactagaaggagacattttatgttatcaggagcatcatgaccaggaaaagacctccttgaccatttttcttttctttcatttccctgctttctagaacactgagtcatggcgcattcactgggcttctctcctcacgggaatgatttctggcgtcaggttgctctttccccccatttagcggctgtgattacctatgaagaatttctttacagggaatctcctttttattagcttgtttcagtttacttggaaataagtgacctgtaattttcaccaataattgaaatgtttcactacattatgtaaatcagcgaacagaggttaaatggaaatacgttacatttttgtaactttaatgaaacctcatgtagaaaagattcaacactgtctttggcaagctattttataaaatcgattaagagactttcctggacacacatggatttagctcccctcagcaccctaatagtagacccagaaaggcgtttttgctcttctcttgaaaggcagtccctgaactcccgtgcaggtcacaaacttgggtcccacggagccacggcccagccactgggatgtccacctgccccagccaggcagtggcccctcagattcctggatgcatgaactgtggccccacgccagctgccctgtgcccgttctgttctgtggcacgtctgtgaggcagggcctgatgccaccgtgtttgcttcctctggcagcggtggacggtgaggagggctggtctccgtgggcagagtggacccagtgctccgtgacgtgtggctctgggacccagcagagaggccggtcctgtgacgtcaccagcaacacctgcttggggccctccatccagacacgggcttgcagtctgagcaagtgtgacacccgcagtgagtgtcgggcaggtgacacccgcgtgcctgtgggggtggggccgcgtttctctcagtcatcgggacctttgcaagggacagagctgccctcacgaggtgctgggcctttgcaaggattctagccaggtgaggctctttctcccagctgatgggaggggttctccttccctctcctcagcagctgtgagatgctcctcggttaataaggcacaccgcttacaggcaaatacccctctaggcggcacagcctgatctctctccgcttcttgtgttagtccggcaggacggcggctggagccactggtcaccttggtcttcatgctctgtgacctgtggagttggcaatatcacacgcatccgtctctgcaactccccagtgccccagatggggggcaagaattgcaaagggagtggccgggagaccaaagcctgccagggcgccccatgcccaagtaagtacggtgaaggcggggccctgggtgggcgggcttgcaggcagctcacagtgagcagccacagctggagccgggatccggggtgtcagggcctgttccagcccagcccagccccagccgagcagcaaagggggctgccatcccgggcctggctcggtaatgaacccatcctttgtgattaattctgctcacctgtgctcagcgcaaacctcctctgagatagccccgtttcattccagttcaggacagactgtaattaaaggaagaatgatccagcaccgcagctctgtcatgggagtgagtgtggatgggggagtgagtgtggatggggagtgagtgtggacggggagtgagtgtggatgggagtgagtgcggacgggagtgagtgtggacggggagtgagtgtggatggagtgagtgtggatggggaatgagtgtggatggggagtgagtgtggatggtgtttatgggggaatgagtgtggatggggagtaagtgtggatgggagtgagtgtggatggcgagtgtggatgggagtgagtgtggatggcgagtgtggatgggaatgagtgtggatggggagtgagtgtggatgggaagtgagtgtggatagagtgagtgtggatggggaatgagtgtggatggggagtgagtgtagatgggagtgaatgtggagagtgagtgtggatggggagtgagtgtggatggtgtttacggggcaatgagtgtggatggggagtgagtgtggatggtgtttatgggggaatgagtgtggatggggagtgtggatgggagtgagtgtggatggggagtgtggatggggagtgagtgtggatgggggagtgagtgtggatggggagtgactgtggatgggaatgagtgtggatggggagtgagtatagatgggagtgaatgtggatggggagtgagtgtggatggggagtgagtgtggatggtgtttatggggcaatgagtgtggatggggaatgagtgtggatggggagtgagtgtggatggggagtgagtgtggatggtgtttaagggggaatgagtgtggatggggagtgagtgtggatgggagtgagtgtggatggtgagtgtggatggggagtgagtgtggatggggagggagtgtggatgggggagggagagtgtggatggtggagggagagtgtggatgggggagtgagtgtggatgggggagtgagtgtggatggggagtgagtttggactgagtagtgagtgtggacagagggagagtgtggatgggggagggagaatgtggatgggggagtgagtgtggataggggagtgagtgtggatggggagtaagtgtggatggaagtgagtgtggatggagtgagtgtggatggggagggagtgtgaatgggggagtgagttgtatgggcagtgagtgtggatgggcagtgagtgtggatggaagtgagtgagtgtggactgagtgagtgtggatgggcagtgagtgtggacggggagtgagtttggactgagtagtgagtgtggacagaggatgccgcagatgcacagaactgtgtctctctgaaatagcctttccctgcgtctgtgcagactagggtgtgagttacagagcgcttggcccaaagcatcaagggcttccccagggaggcctggctcgggaagtgcatggatgtgctgagaaaaagagggtgtgcagggattgccttcagctgtgctcacgcctcatgggaactgcctgtgaggacattcggtgtcataccaggcttctgagttgaggccaccctccatggcagagggacagcttggcgaggagctctgagcttctcggtgtaaatggtggtgtggggccgggcacggtggctcatgcctgtaatcccagcactgtgggaggctggggcaggaggattgcttgaggccaggagtttgagagcagcctgggcaacatagcgagaccctctctattaaaaaaattcttttattaaaaagaagaggtggtatgatttgtcttctggaggccaagagatcgcagcaaagccattggaaacactggcttctgagtcactcccggaatccaccattgcagcaggcgtagtggtgcgatcacgctctgacctgtagtcagccaacctggggagaaaccagtttgtggggctgtgtagggaacaccatgtcccacctgctcttccctctcactcagccaactcacgttctccaccccgggtcttgctctgagctccccctggttggctttccccgcagtcgatggccgctggagcccctggtccccgtggtcggcctgcactgtcacctgtgccggtgggatccgggagcgcacccgggtctgcaacagccctgagcctcagtacggagggaaggcctgcgtgggggatgtgcaggagcgtcagatgtgcaacaagaggagctgccccgtgggtgagtgaggggtagaagcgggggcactgaaacccgggcttccattctgatgaaaagcacaaacgctttgggaaactagatgaaaaacacagaaaagaaaaatcaattttagttgcacacgcaaagataactacttttaacatctgtgtttcagtcctcctgtatttctaatgtaaaaacaaaaaagatgccaggtggcgtggcctgtggaatgtgggtagttgtgtggcgtggaatgtggtgtgtgggtaattgtgtggtgtggcctgtggaatgtgggtagttgtgtggcgtggcctgtggaatgtgggcagttgtgtggcatggtatgtggtgtgtgggtagttgtgtggcatggaatgtggagtgtgggtagttgtgtggtgtggaatgtggtgtgtgggtagttgtgtggtgtggcctgtggcatgtgggtagttgtgtggctgggaacatagcatgtagatagttgtgtggtatggaacatggtgtgtgggtagttgcatggtgtggactgtggcatctgggtggttgtgtggtgtggactgtggcatctgggtggttgtgtggtctggaatatgtagttgtgtagtgtgaaacgtggcatgtgagtagctgtgtgttgtgaaacatggtgtgtaggtagttgtgcggtgtggaacatggtgcatgggcagcggtgtggtgtgaaatgtgacacatggtagttgtgtggtctggaacgtggcatgtaggtagtagtgtggtgtgtcaccttgcatgtagttatgtgttgtagaaggtggtgcgtgggcagttgtatggtctggaacatggtacatgggtagttgtgtggtctagaatgtggcatgtaggtagttgtgtggtatagcacctgacgtgtgggcagttgtgtgttgtggaaggtggtgtgtgggcagttgtgtggtctggaatgtggcacatggtagttgtgtggtctggaacatggtgtgtaggtagttgtgtagtgtggaaggtggcgtgtgggtagttgtgtggtctggaacgtggcacataggtagttgtgtggtgtggcacctggggtgtagttgtgtgttgtggaaggtggtgcgtgggcagctgtgtggtctggaacatggcacgtaggtatttgtgtggtgtggaaagtgacgcatgggtagttgtgtggtctggaatgtggtgcataggtagttgtgcagtgtggcacctggggtgtagttgtgtgttgtggaaggtggtgcatgggcagttgtgtggtctggaaggtggcacgtggtagttgtatggtctggaacatggtgtgtgggtagttgtgtagtgtggaaggtggcacgtgggtagttgtgtgatccggaacgtggcgcgtaggtaggtttgtggtgtggcacctgacatgtagttgtgtgttgtggaacctggtgcgtaggcagttgtgtgttgtggaaggtggcgtgtgggtagttgtgtggtgtggcccgtggcgtgtagtcataatgtacacgtgcttctgcaacccgctgcactgtgtccacctgagcaatgcggtcttggagatgatgcctcttgatgatcatccagaatcacaccagagtgttcctgactacacaattcgatgacaaagacatcccagagtgtttgacggcccacagggcgggcttccttctgtgctgcgcagggcgcgtggtgaactctgctccgccttctcccacccagatggctgtttatccaacccctgcttcccgggagcccagtgcagcagcttccccgatgggtcctggtcatgcggctcctgccctgtgggcttcttgggcaatggcacccactgtgaggacctggacgaggtgggtgaccccgccctgggctgtgggcgccctgaggtcgggagcggcctctcatgtctgcttgtccccgcagtgtgccctggtccccgacatctgcttctccaccagcaaggtgcctcgctgtgtcaacactcagcctggcttccactgcctgccctgcccgccccgatacagagggaaccagcccgtcggggtcggcctggaagcagccaagacggaaaagcaagtacgcaaggccggccttccttgtgtgttgcgagcggctttggaaaaatcagatgagctcagaaaagcagcaggaggaaggagaggaaggggtggcgtggcccgggagaggcatgggaggggctggcccggggaagctgagcacctgctcggctgggccgctgctctccgcgcggggtgcggggcgtgctcagccgggcctgtgagggtcaggccgccacctctccgctgttagcgcagcccttggtgagctgcagccgaggctcagaaacgatggctgagtcacaaacggagcctcaggaacgaacagcacctcaagtgcgtgtccagaaagcccttcccacttcaggacttgggtccgcttgggaccggacctgctggggcctgcggtgcccgacgccccgcctcgacgcctccggagccatcgtcctgcctgtcgctaaccccgcagcccttctccccgtaggtgtgtgagcccgaaaacccatgcaaggacaagacacacaactgccacaagcacgcggagtgcatctacctgggccacttcagcgaccccatgtacaagtgcgagtgccagacaggctacgcgggcgacgggctcatctgcggggaggactcggacctggacggctggcccaacctcaatctggtctgcgccaccaacgccacctaccactgcatcaaggtgaggcgcggggctcgcagggcacacggggccacggcggtcagccctcctcctggcgccggggacgctacgcggacggggggcgggggcagcacagggaatttggaaggagggtctctcaggcctcttgcctgatcaccaggttgaatgcatccccctggtcccctctctggaggtccttagtagacacaggcacactctggcgccgcccactgctgggcacagagaacctcgggcacgtcggcccatatttgcaattgcgcgcatcgttaacgcctgaaactgagcagagggaggacgccggctccacgctcggctccaggctgtgcagaggccattgtgtctcaggcaggtctggccaggctatgtcacttggaaagagttaggacatggttttcttcccaaagcccaagcgtgttgcagtataaggagctgctcagctggaagaaggagctccttcggggcccatcccaggctggactgctttcctgtggccgctggaacgaacaccacggcccgggaggctcacaacaacaggaatctgttatctcacagctctggaggcctgaaacacaacgtcaaggtgctagcggggccgtgctccctctgcttctcccagcttctctggctcaggcgtcgctgggcttctggcgctggtggctgcatggccctgacctctggtcggcttcacaccactttctccagtgcctttctctccggaaacttcctctgcctctctttgataagaacacctgtggttgtatttagggcccacccagataatccaggatgagcctcactgttcaatgtccttgacctaattccacttgttaccatacaagatgaaattcacttcagccatatcaggtgacatccccgggcgccaagacactaggacgcggacatccatcgtggggactgccactcagtccaccgcacagggtgccccaaaatgttttagtgcagttttatgccttaagaaggtcagacatggaaatgccacaaactgacacaaaatatcatttgaaaatataaatatattcatttatttaatatttaatcattcttgcaaattttgtgttaattttctctgtcagtcccgcttgattaaagatgccaaatactcactgaaacaaaatatgagtatgttttaaaatcaacgaggcactgatcccaacctatgttacaccccttggctacccagcctacccttcttgaagcccctgatttcagaaggtcagctgcagctgagtccgtgctgctagaagatatcccgattattctttccatcattgtggaattttagatggaaatttaataacttcgaaaatggtatataatttgcaaagttatatgtatatatacacatacacaaaaggatttaaaagtgagacttgacaagggacccctgtgcccgttcccatattaacccgacacacaggtgctggatcctccccattgccaggggcccccgtctgggatccgtgtcctccatgacaagcaacatgctctcctttcttaatctgtaagtgctgaaactctgggctccagcacaagaccccaggttctgtcttctgattcaacgagtgatgtgctttgagccacggggatgacacacccttggggctcttgtactgaaactgaaacggacacgctactctctaccttttcctggatttccaattccctcaagttgttagtgtctgcacagctcagctttaaattatggtataactggactgaaatgaaaggagtttttgcccaattacatgcattacccactcaccgtgaaaagctgagttagcagataatttcaagttctcagccctggtttctgaacatatcacatacatatttgaaagactcttttctttgagattttttgactggtgagggttaaacgtttataagctttggcattttgatttatgagctgaagtctgtgggaaggaaagcaccactaaagcctcttttctctcccatgttctctcagagcaataccttgtcattctcttcttgtttctgcagttgtttggcaacctcactgggattctgggctccgaacacaagtttcttttgtctccctcgtgagtagtggtgacataatttccagggcaggagttgagaagaaattcatgcgcttctggcctcctggctcctctctcagctcccgcttgagatcgaggactgatggggcacgcttccttcctcggcgccatgctggtttcatttcacctgcattcctgaaagaggcgctttcctaaatgtttttccaagtattcttccttctccaattgcaggataactgcccccatctgccaaattctgggcaggaagactttgacaaggacgggattggcgatgcctgtgatgatgacgatgacaatgacggtgtgaccgatgagaaggtaggagcagcttgtgccgcgcacctgccctgggttccaggagcagcgaggtccacaggaggccactttataccaaacagcccttgtcaacgtaactgccattgtcctgcaagcgtttgtgcataggcagttcccaaaggtcactataaagacagtcctttgcaaaagcggattttacctcagtgcatggggctgcccagggtgtgctgccggaaatgttttgaataattttttctattttaactgcaaaaaaatagaagacctcctctccttctgctgaggagccagtgatgggcaaggctgacaccaccatgagtgatagacttgcctttatggcaacatttaaaatattaccatttttctaagaaaattgctgcaaacacaaatggtttaatgtatttgtacacaaaacagctctagcaagaatagatcaagattttactcactgcttttttacatctgactttgatgggagacattgactcactaatccattcatttatttgatatttacatatctctcctcaccatgaagtgtatgatataccatttttgccttagcaatctacaaattttcaacaaaagacagatgcataaataatgataaaatgatttgatatggaaaaagtgtttggcgagggctaactctttttttttttttttttggtcgctcaggcttgagtgcaatggcatgatcttggctcactgcaatctccatcttctgggttcaagcgattctcttgcctcagtctcctgagtaactggcattacaggcgcacaccaccacgcccggctcatttttgtatttttaggagagatggggtttcaccatgttggccaggctggtctcgaactcctgacctcaggtgacccgcctgccttggcctcccaaagtgctgggattaatggtgtgagccactgtgcccgggcctaactggctttttaaagcactgggattaaaggtgtgagccactgcgcccggccctggtcttgaactcctgacctcaggtgatccgcccgcctcagcctcccatagtgctgggattaaaggtgtgagcctccgtgccctgccctgactggctttttgaagtgctgggattacaggtgtgagccacagtgcccagctgtgattaaaggtgtgagccaccgtccagccctaactggcttttgtgtttgtttgatttctatattgattttcatcaaccttgagtacataacttataagtgctaaacggcccgacacacattcctatgatcttcgttaaagtcttccctttcttggttttccaggacaactgccagctcctcttcaatccccgccaggctgactatgacaaggatgaggttggggaccgctgtgacaactgcccttacgtgcacaaccctgcccagatcgacacagacaacaatggagagggtgacgcctgctccgtggacattgatggggacggtgggtgcttctgctccttcccatgcgtgcactttttttttttttttgagatggagtttcactattgttgcccagggcagtagcaccatcttggctcactgcgatctccaccttttgggttcaagtgagtctcctgcttcagcctcctgagtagctgggatcacaggtgcacaccaccacgcctagctaattttgtattttaagtagagacgaggtttcaccatgttggccaggctggtctcaagctcctgacctcaaatgatccgcctgccttggcctcccaaagtgctgggattacaggcgtgagccaccgcgcccggcccaatgcatgcattttaagggtcgcaattggaggcattggcaagtttcatgttttattctgaattttgataagctcctttcatttttacactactataagattaaatgattcattcagttattcccatagggacccatgcttattctgccttgccttttcctgaaggtcaggggacaccagccacaggaccgccctagagaaagctatgcatttggtatcctcctctctctgaccccagccttgcagtcctgggcctcgtgcttcttcatggcatcttttctaatgttcacccttcattcaaaaattccaagaagccatttcatgttttcatcaaactgagcttctaggagttagaataacgtgggtgtattgtggttacctctgccactgatcccggttgctgctttatccggagagttcgctggccttggtaagcgagctctgcaacccagtgccactgtcaccgcatggtcatcccttctcttggggtgcctggagaccaggcgagtgcttctgtagaaccagcaagagctgggggcaggctcgcctccacgctggagctcggccccagctcctccacacttcgcctcgtggggtcctcttcccagcccggcgccagccaccccctttctgagccaccccaacctgctgttctgtctcacagcgggtttctcagtctgatcttttccactgatttctgcctccaccctcctctcgttctctgggaatgtggtgggttgctgtctgagggctcgtggtggccagggggctcctcggctccccatccaggatggcgtctgtgatgtgctggatgcagatctcaagctccagtcccttccatttttattttttaggtgttccttacttcccttctccagacctcacctgaccaaagcaaggcgagcgtctcagctcagttctggctcttcctgtggactcgctgccgtgtaacattttgctctgtcatttgtgacactgtcactgatggtattgtttagttcagtgctagtttatatttttgtaacttcagtatcaatgcaactcatcactttcagatttcttaagataagatatgacatctaaaaaccctgccactctctgccattgtttttttcctactcatgtgcatggatgataaactcctgggaactcaacacatactttccaagtgggtattagggagaaataagcaatttagcaagctcagatttacacggcgacagcacattcaactacccctcctgcaacattacccagaaatctccaaaagttggttctatttcaaatgaaaggtatttgaactgtaatgaaatatgtcatatgttcttctaaaatctaatagtctttatattttactatattcttaggcgtctttttattataattaaatagaagtgtggctgtaagcaatttcgtgtgataggaaaaacaatgtgctttttctaaactcacctgtccttctggtttgtttttgttttcttccccctttaaacacttacagatgtcttcaatgaacgagacaattgtccctacgtctacaacactgaccagagggacacggatggtgacggtgtgggggatcactgtgacaactgccccctggtgcacaaccctgaccaggtgagggcagccgcagacaggcggggttggaggtcctcatcagagggacgcggggacggtggcggtgtgggggatcactgtgacaactgcccctggtgcacaaccctgaccagatgagggcagccatgggcaggcgggtctcaggtcctcatcagtcccctccatggggccttgggagttttccatgagctccacaaagacaggataacatggagttttcaatgatttcaattgaaaacatttattcaactcaaatctcagcactattcttgtatctcagtggccacaggccaaatgaatagacgccttcacctcatcagctggagcgaggttgtgtcttcacagaattctctccccattttcctgatgccaacataggaattggcttcatttccaggtttgcgtttgaaagagacaagggaggacagttatcttgatgcagctcataggatatattatcctatgatgtaaatggtgtaaatggcgcaaatggtgtaaaaaagagacataattacctggtagttcatgcttttccagcgaagaagcacatcttcctttagtgaagtgaattactgtggagaggtggcagagggtggagagattcctggaccgagaggcctggccccagtgcttgtcctgacgtcagggtcagtgtgacctcgggccagccgcccctgcgtggccctggggcttgtgctgcaggacgaggaggccggctctcaggcttgcgtcctgctggttcctctccacctcctcaaactggcagtcctctgctgtttctctcacgccccatcccctagaccgacgtggacaatgaccttgttggggaccagtgtgacaacaacgaggacatagatgacgacggccaccagaacaaccaggacaactgcccctacatctccaacgccaaccaggctgaccatgacagagacggccagggcgacgcctgtgaccctgatgatgacaacgatggcgtccccgatgacagggacaactgccggcttgtgttcaacccagaccaggaggacttggacggtgggtgctctctcagctcatgggcgtggaggaaaatggcttctgagcaacccgccagggcagagatatgtatgcacggagatcatcttaaatctgctgctggaaaaagggcaatgactttgggcctcttaaagctgtgggtccatgcaatatgagtttcttctcccctgacactcaacacattcttggctgtgtgtgtgcccttcaacaggtgtgctgcctcaagtgtgtgtgcacgtcgggaggaggagaaatccctgcctccatataacttccagattgttgacgatctcctagaaagaatgcgggttacgaacgtaggatgaattgggaatttggtgtatggggccaggcaggggacaaggaggatttttttgaaagcaaagccaacaaaagtggcacgagtgtgaagcatgagaggaagagctgctttgctcagcagtgagcatgaataggtggcccatagccacgggggcccaaggaaggagctggatgggctgcagtcctctaagtcagcgtccctgagtaataaacaagggcacagctgtgctctggggcttccggggaggctgtgagaaagtggccctcacttggagtggggcctggctgacacaggctctctttggaagccacgtccttgacagagggagataaggacttgaggggcatctgagacagcatgactcagaagtacgtgggagatgctgggatcagaagggcagctcctgtgttctccccgagcagcatgaagggatggagtgagcacagcaagcctcatctggactccgtgttcgggcatgcaggggcttgctccccatgcagcctttccccagggagggactgggacagagagaagctgataggcagagcagcatttcagcatttcagaatgccctgataccaactatgtgcctgccacgtggtagctggagtatgttcttgaacagaacggaaactagttgaagaatatgatgagatattcaatccaacttgcctttcctccaaaacggcaggccacgtgatagctaattcagtacattgcaatctgcctgtcaggttatcgtcatcgccgtagactgatagactggacacatgtggcaaattcgtggtccccctgtttgcaccaggcccacctcatccccactccccaccatgccacaaccccgctgaaaacttgacaaggacccactaaacagcggaagtccatgtctccctaggaaaaaccattttagtgtgagttccgctttaatgccaaatagactataaaaggcaaggatgactaagaaaagtaataacagacattcagaaaactatccaaacacaaagctggaaatgcaggttgatattacttgacagccattcaggttttatacctgcagcattgagtttggaacacggtgagaaatggctttatgtgaatttgctgtgctggcctttgctgtgtatttatcacaaaaattttgtgaaaagagttgaggttcctgtgaagtcaaatgttttggagattgttgagcacgaatccacaaaacactgcaaagcactcagtcttagatgttctgggaaagatgcactcatgtttctcagacacggaaaagcaaatggcaaaccaccgaccaccgactttgcttctttgtttttgtttttgtttttgcttgttctttgtgcataggtgatggacggggtgatatttgtaaagatgattttgacaatgacaacatcccagatattgatgatgtgtgtcctgaaaacaatgccatcagtgagacagacttcaggaacttccagatggtccccttggatcccaaagggaccacccaaattgatcccaactgggtcattcgccatcaaggcaaggagctggttcagacagccaactcggaccccggcatcgctgtaggtgagtctctgagacacggcggtggtgccagcatttctccgggggaggcgcccacagaagatgcagactgcactttaagatcatgcaggtgggatgccatgtggtctttctggaagcccccatccttccatggtctgtgaaactgtctgcctaaataaccttgacaggtacatgcacctgccgctctgaagtctctgaaatttcagtaaaccattttattttatagacttggtctatgaaatgggacctcataatcctctcagaactcttgtaagttggatctaaaagaaataccttcaattccactaatctcatggtaaaagagcccatcgggatgatgaggggagcccgccctgcctgctgggcatccactgtcagatggtcacagggccaagctggggattgcctgaaacctgtttcttttttttttcttttttttctttttttttttttgagatggagtcttgctcttgtcccccaggctggagtatagtggtacaatctcagttcactgcaaccttttttccccggttcaagtgattctcctgcctcagcctcctgagtagctgggattacaggtacccaccaccatgcccggctaatttttgcatttttagtagagacaaggtttcaccatattggtcagaccagtctcgaactcttgacctcaggtgatctgcccacctcggcctctcaaagtgctgggattacaggcatgagtcactactcccggccacctgaaaggtgtttctaacgaaaccttatggcgttgcatccaggttttgacgagtttgggtctgtggacttcagtggcacattctacgtaaacactgaccgggacgacgactatgccggcttcgtctttggttaccagtcaagcagccgcttctatgtggtgatgtggaagcaggtgacgcagacctactgggaggaccagcccacgcgggcctatggctactccggcgtgtccctcaaggtggtgaactccaccacggggacgggcgagcacctgaggaacgcgctgtggcacacggggaacacgccggggcaggtgaggttggctggccaggcccacacatctcctctgcaccactgtggctgcagagtgtttcagcaggactagcccagtccagagaccccacttttgtctttattaattttaactccaggcacagttattttaataatcttactttattatagacactgtgcctggggttacaactcaacacagttgataattaccagttaaatacagttgctaatccttttacaaattaaacctcttttaccctcttctggagatagggagtgagcataggacataatgatcaaagatataatatgaaaaaaatattttaaaaattgaagctagggagaattgaatatcaaaacttcaagaattttgcccaacatcccatatcaaggaaagagaagatccagacatgaacccaggaatctgaggatcaggtgcctgggctcttcaatccaggaatctgagggtcaggtgccttggctctcagccctgagccacactctgtccatgggcttcaatccacagtagagatttggatgataaacacatcagagagatatggagcaccatgagccttaagcatgaacttgcaaagtcatgtttttgcttcctgcttggtgttacagagctgtggttaaggctccgggtgcccatggcactcaagagtgctatgttctctctcaggtgcgaaccttatggcacgaccccaggaacattggctggaaggactacacggcctataggtggcacctgactcacaggcccaagactggctacatcaggtgagggcaggtcagcacagctgcatttcttccaaggggcttcccatcggacggcacatttgaacattaatagacaaataagctcaagtgaattctaactttttgttttactctggattcttcgtcattaactgctttctcttttctatcctgcatctctactaaatattaagtatttttaaaaaatggttgaaaaggagaatatacaatctgctttgttttgggatgataaccatattttctcctaatgaataccccaggcaggggagaacacctgcaattaaaataactgcatctttgcagaattagcatgtgctttattggagactagatttgtacctgatataaatggctgaatttaaaacacggttgtatgaagttttgacacagttagcccaacagaatcttttcccttggcttaacagtatttataattgatttttattcaaacaaaatgtggtcaatttaaaatcaaggtgtttttgttttttcaaagttaataagcaccaagatcaggctggactctgcacagatgccaggagtgtgtgagtccctggcaatagagggcagatctgtgtgggtgaagtgcaggctcgtggcctcgctggaacgtttccctagggggcctcctgtttattcatattgatgccccatcctcctgtcgggggcttggtgtatccagtcctgctcccacgcagcttccacagtggggaggagagccggtgagctcatggttttagcacaaggtgaagtagggagagtccggtgcatcttcccaggaagtgggaagcttcctcctcaccccaccaaaggtagagtctcctctaaagcccttgcctgggtgactgtaagtgaactcacagattgtgacaatagtgtggttgcaagaaggaaggcgtgccctggatcagtgctgcaccaggggtggctggagctccaaaggagaaagccagcaatgccccctggggcactgaagccctgggcggagtatccacagcttgtgtccggagccaaccttccatcactggtgaatgcttcacagagttcatgttgtctttctttcctcttcttctttttaaacaccatttttagagtcttagtgcatgaaggaaaacaggtcatggcagactcaggacctatctatgaccaaacctacgctggcgggcggctgggtctatttgtcttctctcaagaaatggtctatttctcagacctcaagtacgaatgcagaggtgagtgtgagcacttcaggttagtggggaaggcatgtggcacccagaaagggaaaggggtacacagtgcgctcttccacttacaaaagctgtacatcagggcaataaacctaatgcacaataccacacatgagccccctgcacattccaagcagccatttcatttggtcagcttggattgttttgtttttaattgcatttggatgcctctggtagaacactttccaattatttacaggtcccacccatcctcattgtgccatagcctagagtttcctagatttcctccacttccaggctcctgacgccattttagattggtacccttgcattagcaatggcaggcaggcaggaaggaaagaaggaaggaaggagtttctctatagttatctcgctacaggtatatttgaatcaaaatattatagacctggaagataacttgaattccatctgctctaattccatgccttcaaatgcgcattacccttccacagatgcagtaaataaggctcaggatgcttctcaagaatcacacattgaaaatcatgtgtttggctgggggcagtggctcatgcctgtaatcctagccctttgggaggccaaggcgggtggatcccctgaggtcaggagttcgagaccagcctggccaacagggcaaaaccctgttggggttgatttatctgcttgcttctgtggaggttttcttctccttatgttaggatgtctttcaaggcatctcatttcctcccatccatccatatcattcatccacccacccatatatctcatccatccacccatccatccatccattcatccacccatctcatccattcacccaaccatccatccatccacccacccacacacccacccatctcatccatccaaccacccatccacccaactatctcatccatccatccatccacccacccatccacctatccatctaatccatccacccacccacccactcatccatttcatccatccatccacccacacatccacccaaccatttcattcacccccactcactcatctatcccatccatccattcatctcatccactcacctacctactcatccatccatccatccacctatcaatacatccatctcatccatccatccatccatctcatccacccacctactcatccatccatccactcatctcatccacccacctactcatccatccatccactcatccacccacctactcatccatccatccactcatctcatccacccacctactcatccatccatccactcatctcatccacttacccacccactcatcatccatccatccacccagcacttatccatccatcttatccatccatccatccatctcagccacccacccatgcactcatccatctcatccaccaacccactcatccctccatccacccacccacccatccatccatctcatccacccacctatctcatccatccatccacctgtctcatccatccatccatcccatccatccatctactcatccgcccatccatctcatccattcacccaaccatccatctcatccatccatccattcatccatccacccacccacacacccacccatctcatccatccatccacccagccccatccacctatccatctagtccatccacccacccacccatccatctcatccatccatccatccacccatccatttcatccacccccactcatctatcccatccatccatctcagccacccacccacccactcatccatctcatccatccacccacccatccatctccaccaacccacctatctcattcatccatccatccatcaattcatctcatccacccattcatctcatctaccaacccactcatccatccatccacccacccatttcatccatccaccaatccatttcatccatccatccacccatccatccatctcatccagccacccaaccatctcatcatccatccacccattcatctcatccaccaacccactcatccatccatccacccactcatttcatccatccatccatccatctcatccacccacccaccccatccatccacccatccatccacccacccatttcatccacccacccatccatttcatccatccatccatccatccatctcatccacccacccaccgacccatctcatccatccacccacccatctcatccatccacccatccatttcatccatccatccatccatccatatgatagatctcatctttaattaaagtaattatatttctggttctaggtaaaacaaaataaatcactacccatggcccagttatgctaattgtttattgcttttttttttctttttgtagatatttaaacaagatttgctgcatttccggcaatgccctgtgcatgccatggtccctagacacctcagttcattgtggtccttgtggcttctctctctagcagcacctcctgtcccttgaccttaactctgatggttcttcacctcctgccagcaaccccaaacccaagtgccttcagaggataaatatcaatggaactcagagatgaacatctaacccactagaggaaaccagtttggtgatatatgagactttatgtggagtgaaaattgggcatgccattacattgctttttcttgtttgtttaaaaagaatgacgtttacatataaaatgtaattacttattgtatttatgtgtatatggagttgaagggaatactgtgcataagccattatgataaattaagcatgaaaaatattgctgaactacttttggtgcttaaagttgtcactattcttgaattagagttgctctacaatgacacacaaatcccattaaataaattataaacaagggtcaattcaaatttgaagtaatgttttagtaaggagagattagaagacaacaggcatagcaaatgacataagctaccgattaactaatcggaacatgtaaaacagttacaaaaataaacgaactctcctcttgtcctacaatgaaagccctcatgtgcagtagagatgcagtttcatcaaagaacaaacatccttgcaaatgggtgtgacgcggttccagatgtggatttggcaaaacctcatttaagtaaaaggttagcagagcaaagtgcggtgctttagctgctgcttgtgccgctgtggcgtcggggaggctcctgcctgagcttccttccccagctttgctgcctgagaggaaccagagcagacgcacaggccggaaaaggcgcatctaacgcgtatctaggctttggtaactgcggacaagttgcttttacctgatttgatgatacatttcattaaggttccagttataaatattttgttaatatttattaagtgactatagaatgcaactccatttaccagtaacttattttaaatatgcctagtaacacatatgtagtataatttctagaaacaaacatctaataagtatataatcctgtgaaaatatgaggcttgataatattaggttgtcacgatgaagcatgctagaagctgtaacagaatacatagagaataatgaggagtttatgatggaaccttaaatatataatgttgccagcgattttagttcaatatttgttactgttatctatctgctgtatatggaattcttttaattcaaacgctgaaaagaatcagcatttagtcttgccaggcacacccaataatcagtcatgtgtaatatgcacaagtttgtttttgtttttgttttttttgttggttggtttgtttttttgctttaagttgcatgatctttctgcaggaaatagtcactcatcccactccacataaggggtttagtaagagaagtctgtctgtctgatgatggatagggggcaaatctttttcccctttctgttaatagtcatcacatttctatgccaaacaggaacaatccataactttagtcttaatgtacacattgcattttgataaaattaattttgttgtttcctttgaggttgatcgttgtgttgttgttttgctgcactttttacttttttgcgtgtggagctgtattcccgagaccaacgaagcgttgggatacttcattaaatgtagcgactgtcaacagcgtgcaggttttctgtttctgtgttgtggggtcaaccgtacaatggtgtgggagtgacgatgatgtgagtatttagaatgtaccatattttttgtaaattatttatgtttttctaaacaaatttatcgtataggttgatgaaacgtcatgtgttttgccaaagactgtaaatatttatttatgtgttcacatggtcaaaatttcaccactgaaaccctgcacttagctagaacctcatttttaaagattaacaacaggaaataaattgtaaaaaaggttttctatacatga

SEQ ID NO: 145 - DNA, 39886 bp, Homo sapiens
ggcccaccgtactacttctgcgcctgcgcgaccgtgattccccgctcgcgactccccaccccccagggctccctaaagagggccacgagctgcgaaagggcgggaaaggcagttggagaagaggtaagcggttactcactccatggctgcagcaaggagaggcggcggcggcctcggctgaagaaagaaggtgggagcggagagcgcaggcgtggtgagcgcggagacgggccgggggcacaaaggggtcgaggctacagagccatggccggggctacgcaggcagaggcggcgacactgtagtgagaagagactgtgatccgaggacagggaatgaggcggccccggggactggggacagatatatactgggtggcggagcacggccctcccggatccttccgcgccccgccctcgcgcggccccaaccgggaggcagccgggtcccctcctcctggggatcaggggatccgagcctttccttcccactcctagggtccgggaccctcctccctctcagctggggatccgacctcttccctctgagccggggatccagccctctccttgtggctccggggtctggtttcctcctcctgactctaagctctggtttctttctctttctgcctctgaggtctgggcctgcttcctcctgtgattttgaggatccagcctcattctcttcccgcagacctgcaccagttcatttctctttccctttccttgcttgcagaatttcctgccagtcacttttcacttcttcatcccccagctgctgactctgagaaaccctcgtgggttagagtccagcatgagtcacagcactctcccaaatacagacctgccaggatggcctcgggcaaataacttaagttctcttacttcatttccctatctgtaaaataagaaaaatcaactcgcctggtgggtttatgagactcaaataagacgatgtctggcaagccttatgcacagagctcaactcatacattcctgttcaactgttttttttttttgagacggagtctctccgtctctgtcgcccaggctggagtgcagtggcgcgatctcggctcactgcaaactccgcctcccaggttcacgccattctcctgcctcagcctcccgagtagctgggactacaggcgcccgccaccacgcccggctaattttttgtatttttagtagagacggggtttcactgtgttagccaggatggtctcaatttcctggcctcgtgatccgcccgcctcggcctcccaaagtgctgggattacaggcgtgagccatcgctcccggcctcagcatattttattaataggaactctggggcccagtctcatttcttccttaccacttgtaagagccgcagacgttggactgtccaacacctgctgtcattcttctgtctccctcatccctctaaagtgtctgtttccagctatcctcatcttccattccaaatgatgggtgcccaggccccatcccctggcagggattcagacatcgaggccccagctgcgtccttttctccatcccttgcccttggcttcctttcaaaccgtccttcagcttccactggataggaactatctcccaaccctgccaaaaatggaagatctccgttttcgtttagtcacagggtagccatcttgccccttctcatgcactgggccctcctccaccagccgaggtggatgtccgtcttttctctgttgcagaaacccaccttgtcccatccacatcaggacatcccagctggagttcaaccttcatcccttctgtggcagttaggagactgaatcaaggtccagagaaggtggaggaatcctgatactgagcggtacacacaagcttctttctccttccttacctgttgcgggcaggaagtccttcttgggatctgaccaccttcccttagagcacttactgtccactctgccagtttttgagcacttgccctatattttcttgggcctataggggctgtgttatcactgaggcagtatacagagtagcagctaagagcatagactgagcttgtcccacccgtgggcctgcatgcggcctagaacagctttgaatgcagcctaacacaaatttgtaaaccttaccaaaacatgcgaattttttgcgatttttttttaagttcatcagctatcaatagtgtatgttatgtgtggcctaagacaattcttcaatgtggccccaggaagccaaattttatacatacctggcatagactctggagccagattatatgagttcaaaacttgactgcacccctcttactagctgtgtgaccctggccatttcccttccctgtgcctcagtttcccctgtggtacgaagtggcattaagaatacctacctctggaccaggcacggtggctcatgcctgtagtcccaccaccctgggaggctgaggtgggcagattgcttgatctcaggaattcgagaccagcctgggcaacatggtgaaaccctgtctctaccaaaaatacaaaaaaatagtcgggtgtggtggtttgcacctgtggtcccagctactcatgaggctaaggcaggaggatcacttgaaccctggggtggggcggaggttgcagtaagccgagattgtgccaccacactgcagcctgggtgacagagtgagacctcgtctcaaaaaaaaaaaaaaaaaagtacctacttcttagggctgttacaaggattaaatgagttaatccgtgtcgagcagttagactaacgcctgggacacagtaggtgctgcataaaagtggttattgttattgctgtaattaaggtggatgtgttctcattccattgctgtatagatttttgaacaaaagcagatggaattaagggtagactgttgggcagactgccagtggtaaggacgcacagacgtgccctatctcccccgccccgccggtagaatcttttcctacgaagatcttctagattgtacatggggactgggtttggtttggtttggtttggtttttttgagacagagtcttgctgtgtcgcccaggctggagtgcagtggcatgatcttggctcacttcaacctccacttcccagattcaagcaattctcctgcctcagccttccaagtagctgggattacaggcgcccaccaccacgcctggctaatttttgtatttttagtagagacggggttttgccatgttggccaggctggtcttgaactcctgacttcaggtgatccacccacctcggcctcccaaaatgctgggatttacaggcatgagccaccacacccagtcttaagcaagacctagcttttttttttttttttttttttgagacagagtctcgctctgttgcccaggctggagtgcagtggcaccgtcacagctcactgcaaccaccgcctcccaggttcaagccattctcctgcttcaggctccagagtagctgggattacagacatgcaccatcatgcctggctaatttttatatttttagtagatacagggtttcaccatgttggtcaggctggtctcgaactcatgacctcgtgatctgcctgcctcagcctcccaaagtgctgggattacaggtgtgagccaccgtacccaagggggttattttttaaataaaattttttattttggaataattgtagattgactcaacagaaaagttgcaaagataatacggagaatttctgtatgcccctcacttggttttttccattaacattttacattactttgccacatttgtcacaaccaaggcaacatcagtatgttaccattgaccaaatgccattcttgattctgaccacacttgatgctgattttggtagttgttacttaatgccctttctgctccttccggatgccttcaggatgccacgttatatttaggcatcatggctccgcagcctcctctggcctgtgactggttttagactttccttgtccttcatgaccttgacagtttggaaaaatgctggttgggtattttatggaatgtgcttccatttggttttgtctcagactgggattgcgggatattgagaggatggccaggtaggatgctatttttttttttttttggctttttttagtagagatgggggggagggtcttactatgttgcccaggctggtcttgaattcctgattcctgggctcaaacgatcctcctgcctcaccctcccaaagtgttaggattacaagcctgagccactgtgcccggcctgggttttttgttttgttttgttttttaatttttttggttttttgagacggagtttcactcttgttgcccaggctggagtgcaatggtgccatctcggctcaccgcaacctctgcctcctgggttcaagagattctcctgcctcagcctcccgagtagctaggattacaggcatgtgtcaccacacatggctaattttgtatttttagtagagacggggtttctccatgttggtcaggctggtctcgaactcccgaactcaggcgatccacccgcctcagcctcccaaagtgctggtattacaggcgtgaaccaccgcgcctggcccggtgtgggtaatttttaatagcttggtcagtaggagaattgcattgctggctatgtgcggtttatgctggctgcagaggtgtctgggcagggactctgcttcccctccccaccgttttgccgccttttctctctagctattgggtcccacccacttcagcccagccagacttagcagctggactcagggtgagtgggtgccagttggcacccttagctctccagcccctcccagcctgttctagttcatagccggtcatcagtggttgcctgcgacccttctccccagatcttcgaaccctgagtcccctcgtgtgcacattcctgacccaggcctgtggccccttcaggactcatgtcctggcctcccccagcctcgagctccccttcaactcctgagctggggcttgaagcaagggtggggctactggggactctttttcggtgcggaggggcctggcttggggagtgaggcggtggttgcaggcaggttgcatcagccctggctgtttgacggggacggggagttcggggattctctggggaccccagcacacctggcaaccgctcccggttagcagagccttggataagggagaacccccgcacagcaagagtaggggtggtgtggagagggagggagatcagccacccgtgcaggaccctgagaatctgaggctcggtgccaagaaggggcctcagatcacagaggcttgttagcaggagtcaagactgaggtcccgagaggtaaggggggttgtgaaaatcacagtgccagttagatgggacctcagcctccaccatgctgcacagcttccagggccccgaggcccatggtgtagtctctgggaggtctccaagccctgaccctcacctcaggcctgctgctgctcacagttgccagacgctatcgattcctgcctgcacctgcaccgtgccatcgccctgctattgccgcaactcctcactgctttcccaatcacggtggcctcctggcatgatggaaaaggctccgagttttgcatcagacagaccggggttctggtcctgagcccagcactcagttgtagactggagtgcaggcagggccctcatctgccgagcctcggctgccttccgcagcgtgggtcagagcatgggccctagagccagcctgctgggttcacaccccaactccaccacttctgtgaccctcagcaagtggcatcctctttctatgactcagtttcccctccgtaaaatggggatgagatggtccattgcagacggtggttttgaggattaaatgtgtaaatgtgcgtgaaatacctagagtggggcctggcatagggaaatgccctgtgagcagtagttcctgctctggggcctggtgtgggagcgctgtggagatggcatcagtgaagccggcggctgccagagcccgggtctgtgtgtgattctctctgttctcgccacgcctgcttctgctttcagatccgccgtgtgcagatgtctgcctacgtgactgctcccccgaacgcttcgagggcaaagtcagggccctcctcattcccagaaacgttccccacaaccccccgccctgtgctgctatttccgtaggcatcaatacattttctaatgagttgctcagcacagaggccagcgaatgtgatactgaggtccctgagaggagccagggagggtaactgggtcacgcaggccaggggtgccggggttgaaggtgggagtcctggcaaacaagggcaggtaggccaaggccagctcagttggggagaggatgacgcgggggctgggagacagcacaggctgccacgtggcccacagtcctccagagccccttccctcccttgtgcctgcccttgtcccttcagtagaagcagtcacagctcttatgcaaaaaaaaagggacacagcaaactgataacaactgacaccagtgtcctagagcccaggatgccatcactcaccgcttagtggtctgggacaagatactgtaccccccgacctgtggtcacctcatcagtaaaatgggcacaatcatagaactaccttggggcagtgtggaggggcagggggttgacatgggaagaggcctggaccggtgaactgctgaccaccttgggccctgtgtcaggcccagagggaggggtggctcccagaagcacctgggcccctgaaaggcaccggggccgcagcaacactggcagcgctggtggtgcaaagctgctggtttcacgggagaagctggaaatccagttttttttttttctgtgagatccaagttttaaaggtaggcaagtaattcagaaaaacctggaaaaccccagcaaaccaccagtgtggacaggactcaggctgctggccctctgtgacttcccctccccacagctgtcatcctctctgtccacagcagagagcaaaaggaacccagccctcattccaagagtctccgaggattgaggctggtcccctctgtgctggactttacaagcagtgagacggagtagggcttcattccgacacagcccggtcccatgtgaaggaggggaggacagtgtttctggggagcagaggaggaggcctaaagaatccttcctgaggttcaggatgcctgctggaagtggggctggtgtcttattactctcttcctaatccccatgcccccagccagaggccaccaggagcacattgctcattgcggcaggaagactgtcccccacagggactcgcagggcacctcaataaggaggcgtttgggctaacttgaggagttgggctgtgtcaggggcaagcccatgactcgcatctatttgacctagagcctgagaagcaaagggagctagtgccgccggggttagttgagaaacagccagcagctctgagtcaggaggggtgtttggtcgtttctgtggtttggacatcatgttgtctgtgttgaggcgtgattcaggagtgggcttgttgtcttggtccctcgtggtcgtggtggcctggcctggggccctagggccctgccgtcggggctgctttctcgcagcaaatgcactcatcctgccaagatggaagggaggtgagagccaccgctgtgtccagaggaggcagctcctgcattcgtctggcccaggatatgtggttcctacagggttgcttgggcacggaggaaagtacccgggcttgagcccagccagcactcataggatggatggtcatggtcggagctgcggggagaggcagaggcggggaaccatggtgggagggcctcacgggacccctaggctccctaggtgccccctcaatgggcagaggggtaccccccatggagagttttgaggtcagcggccatcagagcgccaggccttagcccagtttgatgcagactcctttgccctcttcttcctgacctaccacagagcaggaacgtatgggggttggcgagcagcggacgcccctctcttccctgcaggcgtctcaggccatcgtctgcagctggggcgggcggatcatcctgaattggatttgagagtgaagcccaggctggtctggaaggtcatggagatggcccaggaagtctctggagaatgggaagggggactggatgaggcaggggacggtgatggtggtggcagtggggagcaaaaaaagaccatgttttggagaggctcggtgcggttaggagctcagctgtggggccagacacctgggccagcccttactggttgtgggactttacgcaggtgactgaagtcctctcccctttctcagtttgctcatttataaatgggagccatgatagtttcgcttcgtcacattgctgggggaaagttaagtgagtgagaacaggtgaagccctggaaacagcccagcgcgtgagaaatgccatgaaatgtgggtgtggagatgtccgccgaggcaggaaggggctgtgtttgcttccagttctcataatgaaagccaccctgcccccatcttctggctgccttcacctggttcccagagaaacctccatagcaaccgtctccaccacagcccggcctgggcccttccctccttcccccaccaacatcactgcctctccccggggaagctgatgttgacaagaagaggggctgcggatggggcacaggtgtgcgccgttcctcccccgccacacacgcctgtccgctgctctcagagtccctcagccctgatgcctcagtccctctccaggccttgatgtcctgtgcctgcaccgccaaccagagcgtttcagctctaggctcttccccagcctgttctcaaccagcattaccggccaccccaaggaaggcatgggcctgcccttagaaactctgcccgagccgttgccctcggggtaaagtcagctctgagcctgacgcctatccgcctccacagcctcatggaggcctctcaaccccttcccagcaccccctggttggttggttggtcggttggttggttgagtggctttattgagatactgtataatccatatccatttatcagtgtccaacttagtggctttagtacgttgacagagttgtgcagccatcaccacagtcaattttagaacattttcatcacgctaaaaagaaactcctaggccgggcatggtggctcacgcctgtaatcccagcaccttgggagaccgaggtgggcggatctcaaggtcgagagattcataccatcctggccaacatggcgaaaccccgtctctactaaaaatacaaaagttagctgggtgtggtggcacgcgcctgtagtcccagctacttgggaggctgaggcaggagaatagcttgaacccgggaggcagaggttgcgatgagctgagatcacgccactgcactccagcctgatgacagagtgagactccgtctcaaaaaaaaaaaattagctggtgtggtggcacacatgtgtaatcccagctattagggaggctgaggtgggaggcccactggagcccgggaggttgaggctatgagcgtgattgcaccactgcactccagcctgggagacagagtgagaccttgtcttagaaaaaaaaaaatttttttttaatgcagtaggtagaggggaaaaaactttcaatacaagagtaagaaataaaagttattggccaaaaaggaagaagccttggcaccagagtattcctcaaatctcttccagtccttttatattaagagcaagcggtggttctagaatcttccttaaaatctctctctggctgtttcctaacttttccatggttgtcttagctgattcgtttttcctgtggggaaaattgctgttggtcctgcgaccagagctcctttggtagcttctgggcctggggagtgggaaggagaaagtagctgctaattagccgtcaggtgacttcaggggaaagcaggagagaaggttgaaaatcagtgaatccacaaatcatttagctactgccttgaggccatcctgtgtagcaagtggcagaggcaggattttggtaccctgggcaagtcgccccctctgagggcctcggtttcctcatctacccgggtgaggagaataagcctgcttaaaacgatttctaagatacataaagaacagtagagaacagtgcatgtagcaggcggccttttgtgtgcaggtggggatagtgccaaccacgcttttgtttaaacgcacagcaagtctctgcaaagatgtgcaacagcagcctgtctccagggagcagggctgggaggctgtgggactcagggaagacaggccacactattcccttttgtaccttttgagctacaacaatgtgaacatactacctattcacaaaatgagttagtttgtttttttgagaccgagtttcactcttgttgcccaggctggagtgcagtggtgtgatctcggctcactgcaacctccgcctcccaggttcaagcaattctcctgcctcagcctcccgagtagctgggattacaggcatgcaccaccatacctggctaattttgtaatttttttttgtagagatggggtttctccatgttggtcaggctggtctcaaactcccgacctcaggtgatccgcccccccacaccccgcccccccccccccagcctcccaaagtgctgggattgcaggcgtgagccactgcgcccggcctagcttttatgtctttaaatgcccaccaatgtcactgggttgtggcagggtggtgcggcctcctgggtagtgagcacacgggaacatttaggcattgaaacatctgaacatgcagtaaaagttccagtgacagcctggggaagacagcttgatccatcacagcttctcccccgaggagctgacagacacacagccacacacaccctgttcctttgtctccacacaggtccttaatgcaagtcggttatgcctgtaggttgaaaggcatcagggaggaaaatgggaccagaatgccaggtgacctaaggaggagagagagaggacagttgaaaacccacaggtatccctgtcccttcctccctccctactattggggatacctggttctgtggaggagaggtggccttttggtggaggtgaacatataggggtgggagaggggagctcttccatgtcacagatttggcttagaaaagcaaccctcgctggacgtggtggctcgtgcctgtaatcttggcactttgggaggcagaggtgggaggatggcttcagcccaggagttggagaccagcctgggcaacatagtgagaccccatctctacaaaaaatcgaatattagctgggcatggcggcgtatgcctgtagtcccagctaacgggaggctagggcaggagaatcatttgagcccagaaagtcgaggctgcagtgagctgtgattataccactgcactggatgacagagtgagactctgtctcaaaaaaaaaaaaagaaaaaggaaagcagaccctctccatggctttgggtttttgtttgtttgtttgttttgtgtgtctgtttgttttagacagagtctcgctctgtcacccaggctggagtgcagtagtgcgatctcggctcactgcaacctccgcctcagcctctcgagtagctgggattacaggcacacaccaccacacctggctaatttttatatttttagtagagacgggggtttcaccatgttggtcagcttggtctcgaactcctgacctcaggtaatccacccacctcggcctgccagagtactgggattacaggcgcgagccaccatccctggcccactctgttttctaccaatggggttggccataccccaggcagggtagttatgtaagagagcaggacaggaaagcccaggccaccgccagctcccgccaggcgactgcaacagtctcctcactcctcccacacagagtctcggtgagtctttcccaacataacccagaccctgacccactcatggtctcatgctcccaaggcactctggtctggccatttggcctggaccgcttgagcatctgccttggctaaggtccacttaggaaggtgttggtcagttgacttcagttcttgaagggcagacttggagctgatctgttattcaaggtttagggggattttctttgacgcaaaggaaagaggaactgattcaggagacggttaagaagcagagtagttagacttgtggagtttgcagacggagaatcccagcactagcactcatggagatggtcctggccagaggttcccacgggagggcaagtgagggaaggcagtgttggaggacggcgtctgagcctcagcaggaatcaaatttccctgggctgagcccagcccatctctgatctccccttgtttctctcctctccactccctcactctctgctcttttctgccctgttctggtctctctggttccaccggtcatacttcccccaaatctgaaataacgaattccatggggaaaggggaggtcccacggagacagctccgcaccctgtccgtcttgcatctgggctctgcgttgtcagcagtgccaccaggtggctgtcagccgaatgccatgggcctttgttcaagtgcctcccagaacttttttatttgtttgagacggggtctcgctcagccgcccaggctgaagtatggtggcatgatcacagctcactgcagcctcaaactcctgggctcaagtcatcctcccacctctatctgggatcacaggcacacgccaccatgccaggctaatttttgtttttttgtttttgagacggagtctcgctctgtctcccaggctggagtgcagtggtgtgatctcggcttactgcaagctccgcctcccgggttgatgccattctcctgcctcagcctcccgagtagctgggactacgggcacccaccaccacgcctggctaatttttttttgtatttttagtgcagacggggtttcaccatggtctggatctcctgacctagtgatccgcccgcctcggccttccaaagtgctgggattacaggcgtgagccaccgcgcctggcctaatttttgtatttttagtagagatacaaaaatacaaaagataccgggaggcggagcttgcagtgagccaagatcccgccactgcactccagcctgggcgacagagcgagactccgtctcaaaaaaaaaaaaaaaaatacaaaagatacaccatgttggccaggctagtctcgaactcctgacctcaggtgatccacccacctcagcctcccaaagtgctgagattacagatgtgagccaccacacttggccaacacttaattctaacatcttttcctcaatgaaactctcccgtcccaggcagaatgtcaagacttggccctggaaagctctggtttcccatcatgggtctgctgtttgctgggtggccttggggagtctgcacttgtttcccacccaggaagggctcggtgtgctgcagtgcagtgctctggcacggtgccggttacacagtaggtccctagtaaatggttgttactgagtccctactgtgtaccaggcactgctgcaggtgctgcgaatacagcagggaacaaacggaaatctggcccagtggagccgacaccatccccaccgttagccttcctctgtgttcggaggcaaccttgtccttccctcccatcatagatggcctatcgtggctgggtgtcagtggcaatccacccacacacatccacagtcctggcagggttgccccagcaccaggggatgtctggattttcagaatcacacctcactttcctttctgtaccagccgccttggtctccatgcacaagggcagacctgcccctgaccccagcccctttctcaaccccagctctgctctgtgtattcccatccacctatctagatttcattctgttctttctccatcgtccctcaacctaccgccattggtttctagtggctgctgtaacaagtcatcacaaatgtagtggtttaaagcaacacgaatgtattttcacagtgctgggggtccagagtctaaatgggtgcatggtgtgtagttcctctgggaaactctaggggagaggctatgtccttctttagctctagaggccgaagccgcctgtgttccttggcttgtggccccctcatcttcaaagccagcagcacagtgtctctcagtccattcttccataggcacatctccctctgactcctgcctccctgaagaacccctgtggtcacctggggctcacgtggataagccagggtaacctctttatcttcatcacatctgcaaagtccctttgccatgtaaggtcacattgacagggtcctggatcagagtgtgggcatgtttgggggccgtttttctgtctacccccccacacacatagcacacatccttcctaattcttcctttccttttggtccaaagctgaggtctcctgtattctttcccaggcacagactcctgtcccaggcatctaaggaaaggggttgggggccgggcacagtggctcactcctgtaatcacagcactttaggaggccaaggtgggcagatcacctgaggtcaggagttcaagaccagcccggctaacatggtgaaaccccgtctctactaaaaatacaaaaattagctgggcatggtggtgcacgcctgtaatcccagctactcgggaggctgaggtgggagaattgcttgaacccgggaggcggaggttgtagtgagccaagatcgcaccaccacactccagcctgggtggcagagcaagactccatctcaaaaaaaaaaaaaaaaaaaaaaaaaaaaaaactgggacttggagtggcacaagaatcacagatggaggtaaggtagtagagctgaccgaaggctggggtgacagcaaagaaccctggttctcacagatgggggtgggatatgcccacctgaattcagatgattccgcatctgaatcccaagcgggtcttcctccgggttcccagggctgtgaaggcggccgtgttgtttgaaactcaagggtaaatgttggggcaggcaggcaggaagggaagggactggcggctctgccagcactttccttggtgacctcaaggcagcgcttctctggagctgtgtcctgcctgggtgaactacagatggtcacagccacccagccctgagcacaggcccaggcataccctcctcctttccctggaaatgcaacactccctcagtttgggttcctccctgcttcctccaccgccaccagcaccatcagcttctttggtaaggaaactctcccctttggcaaatgtggtaattccgggatcagagctcgtaatagtttgcatttgtgagaaacttcccaagttctagtatttgtggctttttgttttttgttttttgcctcaaactcctgggcttaagcaatcctcctgccttggcctccgaaagtactgggattacaggtgtgagccatcatgcctggcctgtcactgttaacctggacagaccctgtggttttggtgcaaatttaacactttgctcaaattgtgatgctgtcctctctgagttccagttcgggcctcaggctcttggcctggaccttctcccagtcttctctaagccacctggcctccagcctctacccctacggttcatcccccacacccataaagtccgcctgtggctccctcaatataacgcccgaaccgttagcatggtatgtatgggtctgccagattctcccgcctgtcacgtggcccacagtccccaagaccaccctgcggctcagtgatgagctaagactcacagagctcagcaaagctttctactcacagtcacggtcacggtttattatggagaaatgatacagactgaaaacagcaaaggggagagatgcaaaagccccaagggagaccaggcacgagcttccagctctcctctgcaggtagagagagtcccgcggacagtgctcagttctccctgcaacagcgtgtggtaacgcttacggagcagtggcggcccgggttgtggggaggacatggcgcacccgtgtggctgaactgaggtctgctgactccagcccctccagaggtcgtgctgatactgtatgacccaaagcccccactctaggtcacagcgtcaacatggactctctagagtggcctggggccccaggtaaacaaaggcgctcttatctggcagcacatttcaagaacatagagattctcctggagctggtcaagggccattttctctctttggaatgtgcagatttgaacagcccaggcttgccaagtcactccttcacacataaacatctcccttcagaagcaccagatcacttagcacccagaggcatgtctgctgtgtgggcctccctgtcttcacacaggcctttcctcccgcgtggacggcgcctctcccccgccatcctttccctggctgatgctgcatctgcaacgctcagcttctccctggaacctgctcccacagcatgtggcccggccctgtgcctgccctgagccctggttgtagagctgacatttgactctggctgccttgagggcagggaccgtggcttaaccagccactctgggcttcactttcctcatttgtcaagtggatctgccccaaagtttgctttgaggaaacggtgagtaatggtaggtctcctttctttcttttttagatggggtctcactctgttgcccaggctggagtgagtggcacaatcacagctcactgcagcctccacctccctgggctccagtgatcctcccatctcagcctcccaggtagctgcgactacaggcgcctgccaccacggccaactcatttttgtgttttttgtgtagagacagcatctcgctatgttggccaggctgttctcgagttcctgggctcaagcgatccccccacctcagcctcccaaagtgctgggattacaggcgtgagccacctcacctggccatatctaaactgcgtggatcagggctggatcagtatgggttcaccattgtgaatagatccctggcacctgagtattggaaaccaatgtggcacttaataaatggtgaactgttggccgggcgcagtggctcatgcctgtaatcccaacactttgggaggccgaggcaagcggatcacctgaggtcaggagttcaagaccagcctggccaacatggagaaaccccatctctactaaaaatacaaaaattagccgggcgtggtggcatgcgcctgtaatcccagctacttggaagctgaggcgagagaatcgcttgaacccgggaagcggaggttgcagtgagccgagatcatgccattccactccagcctgggcaacagagcgagactcccgtctcaaaaaaaaaaaaaaaaaaaaggtgaactgttaagccagacaagtccccatagaagattgttttccttgtagttttttcatagttgcaaagagctttttataaatgctcttcttggaaattttagctacaacttattaatagcaaaagcttttttaagctgagttcttgagaactgagatgtgtaggtgtagctgctcagatgcctttagctgccagtaacaacacaccggcttgaggtggctcagcagtgaggacttttgttctgtcccacaacgggaggaatggatgtaggccgggccaggccccagcagtcctgggggctcaggcacttgccgtggcctcttgaagagacctttctcagaatcccccaggaaagctttatgaaaatgccagggccacagcatcccagccccggagagactggcttagtggagctaacagccttgtgtattttgaatgctcccagtcagtagtgatggacgcccattgagatctactggcttagacaaggcagagcgtgtgcagctggccctggggtcatctccccaggcttgcttggctgtgtggagaaggaggagcagacgaaacaaaacttaggggcctgtgaggaagcagaagggtgcagtggaaggggtgggggtagtgagataggttgcctcttactcaagctggaaggggatttcctgaggacagacaccaagcaatttaaaaactggcctggagagagggaagaggaaacagacctcgtgggtgtttctctgggtcaggcacttggcttctcagtcttgactttgattattcttttgtttttttgagacagggcctccctctttccatttccagcttttagagctgcttctgccttccttggctcctggctttctcacatcttcagattccaaagcgcatcactccagtctgctcgtgtcaccacaagctttcttcccttctccagtcagtcaaatccgtcttctaaggatactgctgatcatctttagggctcacgcctgtagtcctggcactttgagaggacaaagagggaggatcgcttgagcccaggagttgaagaccagggcaacagagtgagatcccatttccacaaaaaataaaaaagattatccacgcatggtggcatgcacctgtagtcctagctactctgggaggctgaggtgggaggatcacttgggtccaggaggttgaggctgcagtgagttgtgatcatgtcactgcattccagctagtatgacagaaaaaaaccctttcccaaaagaaaaagaaaccacccctattcagcactccctctcaccctttcctcaccaggtaacctttgaccttcctgctgatagatggcaccactgggagatttttcagttagacattaccaaaatcaagtcagtttgaactgaatggaaatactgtggcccatgggtcttctggggtgctctttatccctcccccacccccacccccacccatctctggtggggctcatggtctcccgtgatgtcccagtgtctgcagatggttgagaaggtgtccaagggaggcccaggtgcaatcctccacaccacacctacaggtgaaggaggcagctgccttccaagcctggagaaaaccccaggggaggctccgattgcctggctcaggtctcagtttatccttgagccaatcactgcagccaggggcatctgtgctctgagcacatgggtttcagaccctcccctgagttaggaggaggagttccagtgtcctctcctgctcttagagagtgcaggtgtgggcctggggggccttcagcaacccagaccctgccatccagcctgggttcccggccccatctctctctctgaggtccagagaggccctcagggtggcaagagctgatccgctcacaccctgctagagtcagccagggaacctcactgggtcccacgctgggagcaggtcctacagctgttcttgtgtgtcctagtcccgcttgtggcagtgcctcaaatctgatctcctcaggctgaggtgggtccaaggtcctgttctcccgcctcgtcctccacagagtgggagctttccactgggctgaacatggccacgcacgtccctagcaccccggctcctcgtacctgacccctggggcgtgcttttgtgcttctggatccttctcgatgtagcagagcctagtttaggttacacagcatgcatcattatcccatcccaccaccctccaaaccgactgtgcccagtcatgccactgagcttgcctttccaaaactgccatctgacaatgtcacttcctctgctttagaaatcttcccaaggctgcagacaccgacggatttgctttgggagccagagtagctgccgccaccagagtccggagccatgagcgggtttaattttggaggcactggggcccctacaggcgggttcacgtttggcactgcaaagacggcaacaaccacacctgctacagggttttctttctccacctctggcactggagggtttaattttggggctcccttccaaccagccacaagtaccccttccaccggcctgttctcacttgccacccagactccggccacacagacgacaggcttcacttttggaacagcgactcttgcttcggggggaactggattttctttggggatcggtgcttcaaagctcaacttgagcaacacagctgccaccccagccatggcaaaccccagcggctttgggctgggcagcagcaacctcactaatgccatatcgagcaccgtcacctccagccagggcacagcacccaccggctttgtgtttggcccctccaccacctctgtggctccagctaccacatctggaggcttctcattcactggtggaagcacggcccaaccctccggtttcaacattggctcagcagggaattcagcccagcccacggcacctgccacgttgcccttcactccggccacgccagcagccaccacagcaggtgccacacagccagctgctcccacacccacagccaccatcaccagcactgggcccagcctctttgcgtcaatagcaactgctccaacctcatctgccaccactggactctccctctgtacccctgtgaccacagcgggcgcccccactgctgggacacagggcttcagcttaaaggcacctggagcagcttccggcacctccacaacaacatccaccgctgccaccgccaccgccaccaccaccagcagcagcagcaccaccggctttgccttgaatttaaaaccactggcgccagccgggatccccagcaatacagcagctgccgtgaccgctccacctggccctggcgcagctgcaggggcggctgccagctccgccatgacctacgcgcagctggagagcctgatcaacaaatggagcctggagctagaggaccaggagcggcacttcctccagcaggccacccaggtcaacgcctgggaccgcacgctgatcgagaatggagaaaagatcaccagcctgcaccgcgaggtggagaaggtgaagctggaccagaagaggctggaccaggagctcgacttcatcctgtcccagcagaaggagctggaagacctgctgagcccactggaggagttggtcaaggagcagagcgggaccatctacctgcagcacgcggatgaggagcgtgagaaaacctacaagctggctgagaacatcgatgcacagctcaagcgcatggcccaggatctcaaggacatcatcgagcacctgaacacgtccggggcccccgccgacaccagtgacccactgcagcagatctgcaagatcctcaatgcgcacatggactcactgcagtggatcgaccagaactcggccctgctgcagaggaaggtggaggaggtgaccaaggtgtgcgagggccggcgcaaggagcaggagcgcagcttccggatcacctttgactgagcgacagcagccctggggcccgcaggtccctagggagttcatgaggggaatgcgccctgttgtctgtagtttggggttgtggcaagatacttgtttgtttgtttctttctttcacatgactgcccttgacatgatcgctgtgtgctttgcgtttttccatttaggagggtattctgggccttctgcccaggcagcagcctcatgggtgtggcttctgtggctttcatttgagtatctttggccccttttcacctactgcgaccacccacctcatcctggctcagcctggtgatggagaagtgctgatggtcttggtcccagccagggtcgtgggggcagccactctctccaaagcatagtcataggtgtcatgaaaaaataccaaatgtaagagaacctccaagtcagggcgcagtggctcacccctgtaatctcagcactttgggtggccaaggcgggcagatgacttgaggtcaggagttcgagaccagcctggccaacatggtgaaaccccgtctctactaaaaatacaaaaattagtcaggtgtggtggacgcctgtgatctcaatctcagctactcgggaggctgaggcaggagaatcacttgaacccaggaggtgttgcagtgaaccaagatcacaccactgcactccagcctaggcaacagagactctgtctcaaaaaaaaaaaaaaaaaaaaagaaactcccaggagacagcagcctagttttcgagtgtgagcttgtgcttgtgaaagctaaccatgctaaccaccaaggcaaagcagcacagtgtgaatagaacagagcgggatcaagaatttcacagaagacaggtcagctgaggggcctgcacacacagggtgttgaggaaccacagatgggcgccgagaggcctgccttttgcctggcccaggctcacccccaccttgggcctcacctcctccaggaagccttcccagctacccgaagctcaggtggccttcttgcaggtccccgtagcaccctgagcctgtaccttgggtggcacttgttatgctatcctgtgctagccgtttgtgcctcgtctcgctgttagattgtgagttcccatgggcagagacccactgtcgttccccgtgtgtccccagcccggtccctgtcacatttgttaaatgaaagaacaatgaagcccagtgtaacgtcagtccacagaaatagccacagcttccagtggtggccgtagacttggctcggaacttagtggcaccagagtaactctagtcagttacagtaaaatccactgtgtgtggaaggcagaagctagcggttgtatcccaagcatcttttgtatttgtctttatactttgctgaattctctgaaatacctattactgtatgttgcttttctaaataaatgtattgtgaaaccaaaacagctgctgttaatatggataaatgttaggaggagaaagctgagtaaaaagagcaggttccaggagactctgcaggggtgccattcacatgaaacgcacaggcaagcaaatgaagtagtgcttgcatagacataggggtatgcgatgaagcagcttttgtttgatgagacagagtaatagacaaatgcaaatcgtggtttgctccaggaaggggtggtgctagtggtagaagaggaacacacgagtgaagccgccacggggagtgggctccaggtgttttgtgacagttatgtcgtagaatatacacaaatatggctgggcgaggtggctcacacctgtaatcccagcactttgggaggccaagatgggcagatcacttgaggtcagggattcaagaccagcctgggcaacatggtgaaaccccgtctctataaaaactacaaaaaagtttggttgtgcgtggtggcacgcaactgtggtcccagctacctgggaggctgagatggaaggatcatttaagcccaggcctttgaggctgcagtgagccatgatcacaccactgcactccagcctgggcgacagagcaagactctgtctcaaaaaatatacacacatgttaagtcatctagtaccatccctaaggcgctattccagtggttacagatgtcatgggcagcattccttcctgtcacctggggctaaagacacgggcccaatgctcttcctccaccctccagcctcgctctatggactggaatggtcctaagcactcagatctcctgggctgtggggagtggagtgtacccctttggcctcctgctgcctgttccatctcagtctgtgggcaacacttgggagattcatggcccaggttccaaaagtctcccgaagtcatgatcatgagtcattatttccttggaccggccaggtgcggtggctcacacctgtaatcccagcactttgggaggccaaggctggcagaacacctgaggtcaggagttcgagaccagcatggccaacatggagaaatcccatctctaccaaaaatacaaacatgagctggtggctagttaagtggcgggcgcctgtaatcccagctactcgggaggctgtggcaggagaatcgcttgaacccgagaggtggaggttgcagtgagccgagatcatgccattgcactccagcctaggcaacaaaagcgaaacttcgtctcaaataaataaataaaatttccttgcaccatcttgggctctggaggacaagagttgtgtctaagtagaaaccatgggtgtgtgtggtgggagcagtaaaccagaggaagaccccacaacccagctacttctctctgaaagctgtcacctacagcagggaccttttcctgcagttcataggccttgactcatattgtcccctctgccggaagggaggccttgagtccccttaggaggtaggaagcagtttgcattttacctacatttgtgcgttcagcatccatttttagagctgatcctgatctggtgctggaggtaccaaaaaatgcccacaaggtcgttggcaggggccacacaatcatgatgagaaaatttgagcatgtatttccaaagtgtacatgtatatttttcctattattttgcatattatttcctattttgtatattaaccattagcaaagcttaattgctttcttatagttatatttttaaaataaattccagctttgggaggccgaggcgggtggatcacctgaggtcaggagtttgagaccagcctggccaacatggtgaaaccccgtatcttctaaaaatacaaaaattaggggctgggcacggtggctcatgcctgtaatcccagccctttgggaggccaaggtgggcggatcacgaggttaggagatcgagaccatcctggctaacacggtgaaaccctgtctctactaaaaatataaaaaaattagccgggtgtggtggcaggcgcctatagtcccagctactcgggagactgaggcaggagaatggcatgaacccgggaggcggagcttacagtgagcagagatcaagccactgcactccagcctgggcaaaagagtgactccgtctcaaataagtaaataaataatacaaaaattagcccggcgtggtggtgggtgcctgtaactcccaggtactcaggagaatcacttgaacctgggaggcggaggttgcagtgagccaagatcgcgccactgcactccagcctgggcaacaaagttagacttcatctcaaaaaaaaaattttaagttctgcattttcttcccataccccaaaggatcttgagcaccccactctgaataacacaagtgattccattaaatcaggaggctctgtgccccaaagccatgtgagaaatggtcccaacaggcctcctgggggagtctaggagggatcccgagatcgcagcagcatcagcaaccgactgggtgccaccgcgggtgatggctccatcgtaatttcagtttccctttccaggaagaaaatacacagatgtgcttccttcccagtcctgacaaatggcctttccttaagttcctcattaattcatatgaagacaacacatttggtgactaaatttggaatcagaggcttttaaaggtgaatctcagctcttactgctttgctttcccctgtttagggataagagtggcaaatgggggctgggtgtggtggctcatgcctgtaatcccgacattttggggaggccaaggggagtagattacttggggtctggagtttgagaccagcctgggcaacatggcgaaacctcgtctctacaaaaatacaaaaattagcctggcgtagtggctcctgcctgtagtttcagatacttggaggctgaggtgggaggatcacatgaacctgggaggcagacattgcagtgagccgagatcgtaccactgcactccagcctgggtaacaaaagtgagaccctgtctcaaaaaaaaaaaaaaaaaaaaaaaaaacccagcacatataacagtataatatgtagtcaaaccatgagggaatgatgactttttattcttttttagtaaaaactaatcatcaatacaatttattttttagtaatgagtggcttgcaaagcaaaaactcctgaaaatgtaaatcagctcttatgacctggtatgactcagcttcagcacaccactgctcccaagttttcagtaaaccccaaaaatgtcagggtgctttaaaaatctgcccctcagactcagggcagcggctctccacagaacctcccagggagcaaagccctcacgctcggaagcgaggtctgcttcttgcacagcagccagccccccagccaggtttcagtgaccccggctgttcccctgcctgtcccacaggaccacacccttggcttctgcacaccagggccctggtgacttcaaacacagtgacccacatgggcgcccttgtcccgtctcccctccagacaccatcaggttgaaccctctcagacgccaaaggtttcccgaggcaagaagcagaccgggtgcgctgccgtgatggggactagcctggtgccctggggtcacctcagataccctagttcccttgaatccacagaactgatagtgacacttactgaccaagacaatgtcactcaaatgcaatatggactgtgatttgcatcttgacaaaccaaccgttttttgttttgttgttgttttttttttcagagagtcctgctctgttgctcaggctggcgtgcagtggtgtgatctcggctcactgcaatctctgcctcccgggttcaagcgattctcctgcctcagcctcctgagtagctgggactacaggcgtgcactaccacacccagctaattttcgtatttttagtagagacagggttttaccatgttggccaggatggtcttgatctcctgaccttgtgatccacctgtctcggcctcccagagtgctgggattacaggcatgagccaccacacctggccttttttttttgagatgcagtcccgctctgtcgcctaggctggagtggcatgatctcaactcatagcgacctctgcctcccaggttcaagtgattctcctgcctcagcctcctgagtagctgggattacagaggtgcccgccaccacgcctggctaatttttgtatttttagtagagatggggtttcaccatgttgcccaggctggtcttgagctcctgacctcaggtgatccgctcacctcggcctcccaaagtactgtgattgcaggtgtcagccaccatgcccggcctaaactgtttttttgttttgttttgttttgtttttcagtgatgagctattccaggaaacgtgaacattgatttaatgatattaagaaatggctgccatccggagcttgcagtgagccgagatcgtgccactgcactccagcctgggcaactgagcgagactccatctcaaaaaaaaaaaaaaaaaagaaatggctgccatcttaaaatatgataatgatattgtagtttttaaaaagcaaaacatggtcaggtgcagtggctcagccttgtaatcccagcactttgggaggccaagatgggagggatcacccgaagtcaggagttcgagaccagcccagccaacatggtgaaaccctgtctctactaaaaatacgaaaattagctgggcatggtggcctgtacctgtaatcgcagctcctcgggaggctgaggcaggagaaccacttgaacccaggaggtggaggttgcagtgagctgagattgtgccactgcactccggcctgggtgacagaacgagactcagtcccaaaaaatcagaagacaatatggtgcctgggacttgctctaaaataaatccagtgagagggcggggagggtgagtgagacaagggctgtgtgaagccatgaattcacctgggtttatcccctgctcactctggttttagatgtttgaaagtttccataataaaacacttctgagaaagggggacctgcctttcacagcctcccagctgctctgaccccaatatcaggaacttggcatctctgatctaacaagggcaccactaacaaggacaaagccaccatcattcaccttgattccgcacatgcccaacgatgacttctgtcctgggctaaccataaaggccatgggtgctgagagagccccccagaggcagccatgcagtgagtgcccccacccggggccctgggatgttctggaaacaggaaggagggttccatgggaagggggaccctgtcctggggtcaggccaaagattgggggactcactaattctgtcctccgatccctgagtcccttccccaatctgggcctggaccccctgactcccacccaggtcccaggtcatcccctgggcaggccctgcccacccaagccttggtgaaagttttgtgtttgttttgttttgttttgtttttgagacagagtctcgctctgtagcccaggctggagtggaatggcgcggtctcggctcaccgcaacctctgcctcccaggctcgagcgattctcccgcctcaggatcctgagtagctgggattacagatgcccgccaccacgcccggctaatttttttgtatttttagtagagacagggtttcaccatgttggccaggctggtctcgaactcctgatctcgtgatctgcccgcccacctcggcctcccaaagtgctgtgatgacaggagtgagccaccgcgtctggccaatgaaacttttaatactgaccacttagggtctttggacagactcagagaagagaatgcgtatatacgtaaggcaggggcccggtccccagcacatctgtgcagccctcatcagcatcagctgccctgatgggccacgaggcccccagtggggccagggccaggtgtctggctgctgtatagacatgacctaaacctcatcgaaaccatcattgtggttctagaagtcaaccaaataaggtaggatttgccccaccaaagaccattatctgggaggattaaccttattttccagaaactccatcaaaaaaccagaatacccccaaaccagctgaagtcaacagatacttgactgggcctttcctcccctccgctccctccacctgcccctcccctccctcctgtctcccactcacctatccaaactgcttttccctaattccaccctcatccctaaacctaatttaacctgaacaccaatctccttagtattatcagaaatgattctggaggctgggcatggtggctcacacttgtaatcccagcactttgggaggcccaggtgggtggatcacctgaggtcaggacttcaagaccagcctgtccaacatggagaaaccccgtctctactaaaaatataaaaattagctgagcgtggtggtgcgcgcacctgtaatcccagctactggggaggctgaggcaggagaatcacttgaacccaggaggcagaggccacagtgaactgagatcacaccactgtactccagcctgggcgacagagcattctggaaaggcatcaatcctgaaccagctgacttgcgccctctgctcttcactgggggcacctggcctgtctgatgtattgcttcaaactaacattaattgggatttttttttctttaattacaaaagtaatacatgctgaatgaagatgatgtgaaatgcacaaaaaagctcaaaggggccgggcatagtggctcatgcttgtaatcccagcactctgggaggccaaggcaggtagatcacctgagcccaggagtttgagaccaggctgggcaacatagcaaggccccgtcgctatgaaaaagtacaaaaatttagctgtgcatggtggtgtgcacctgtggtcccagctactcgagagactgaggctggaggatcgcttaagcccaggagttcaagaccagcctgggcagcataacaaaatcccatctctacaaacagcacagaaattagccaggtgtggccgggcgaggtggctcacgcctgtaatcccaggactttgggaggccgaggcgggcagatcacaaagtcaggagattgagaccatcctggctaacacggtgaaatctcatctctactaaaaatacaaaaattagccggacgtggtggcaggtgcctgtagtcccagctactctggaggctgaggcaggagaatggcgtgaacccaggaggtggagcttgcagtgagccaagatagcgccactacactccagcctgggtgacagagtgagactccgtctcaattaaaaaaaacaaaaaaaacaaaaaacaggtgtggtagtgcactcctgtagtcccagctactagggaggctgaggtgggaggattgcttgagcccgggaggttgaggctgcagtgagccgagattgtgccactgtgctctagcctgagtgacacagcaagaccccatctctcaaaacaacaacaacaaccacccagaagtcccccaaggtgagctgcacatatgcctggggccagaggagttttgtgcaacaaccctctgtgataaggacaaggggattggtgcagggccccacccactctggggacccaaaaactcctgggacatgccctgggagccagttggctgtgggcctccacacctttccatggttgtttccactgttatgcggctgtaggactgaacaagctattgggcaggggccggggacctggggcccacccgacctggtgaggaatgccagcactgccattccccactgtgggacccaggtcgaggcacaggcgaataaggccccaatcccgccgcgttcatacttgacatgtcgctgtgaatgaaactctgagacctaggccaagccttttcccctctctgtgccccagggtcctcctgtcccaccctctcgccatctccaagcctcagtttcctcaactatcaaatgcaggcattgttgttggttttttgtttgtttgtttgtttgtttttgagacggagtctcactctgtcccccaggctggagtgcagcggtgcaatctcggctcactgcaacctctgcctcccgggttcaagcgattctcctgcctcagtgtcccgagtagttgggattacaggtgtgcaccaccacgcctggctaattttttatatttttggtagagacagggtttcatcattttggccaggttggtcttgaactcctgacctcaagtgatccgcccacctcagcctcccaaagtgctgggattacaggcgtaagccactgtgcctggcctcaaatgcaggcattgtgaggcttacgatgggtgcaaagccctgagcaccaggcggcctccaaggcaggtgatcgccatgggaacatttttgtcactatttttttcttttttagagaaagggtttcgccatcttggccaggctggtctcgagcccctgggctcaagcaatcctcccacctcggcctcccaaagtgctaggattacagcagtgagcctccgcacccggccctcattactattttttatttttattttttattttttgagatggagtctggctctgtcacccaggctagagtgcagtggcacgatctcagctcactgcaacctccacctcttgggttcaagcaattctcctgtcccagcctcctgagtagttgggactacaggcgtatgccaccatgcccggctaatttttatatttttagtagagacgaggttttgccatgttggccaggctggtcttgaactcctgacatcaggtgatccgcctgcctcgacctcccaaagtgctgggattataggcgtgagccacccctggccctcgtcactatttttgctgacccaagctctttcggtccctgaactctccagctctttgatcatttccctttgccacggcctcccgcccctgcgtcacatgccttgttactcacattcaccccccagcccctcccggccataaccgcatccctctttgatttactgcgggagtttcccatcttccttcttgttaatgccctccaacccccacccaacccttgctgcagagaatctgcctccctctggttttcctcctcacggagcccctggctccctctcccccaccccaaggaaagtccctgctattgtttctccacccccacccactccaaggtgccgccccactccctgccctgagcactgaggtggttcttaaagcagggatgggtgaagcctgggcgcttccctctgccgggtggtcactcatagaacccctgagtgcccctgcggccacagcagctggcatttccaaaggagcagcttccagtactaccccaggttccggccacagaacttaacctggattcactcacttgatcctaaaacactgtgacgtctgtagacgtcatttgacagctgtagacgagagccacagaggggagggcgggctcagagcccacgtcctgaccccgggaccacggctgccagccccactgctacacccatgtaacggagggggagactgaggctctgggtggcaagtggagagggaagtggaaccatggggggccctgcaggacatggcgacacctgacggagagggacttggaggggaaagttggcctggcccagggacctgtagcccctctgtccccgtgggaatcaaggaggcagagagagtgcaggggaggatagaaacaagtggcctggtgatcagggacgggggcaaaccgaaggggattccccgttgttggcacggttacctgagcatctatttctggcctccaaaccaccccagaactatctggggcaaaaggaagtgaatagactgattaacttcctccaaccccctttctccaacctcaactagactctgagcattggaccagagcagctccaggaaaccagtttcatttccctcggccagtttcccaaaaggaggggtgggcggggctctgccagtttaaggggagagaaagggccacagcagagacagtggagggcagtggagaggaccgcgctgtcctgctgtcaccaagagctggaggtagtgacacggccagtggtggggggacagagagacaggacccacagaaatagggactgagaagcagtcaggagctggggagatgaggaagagggaaaagaggccgggcgcgggggctcatgcctggaatcccagcactttgggaggccgaggtgggtggatcacctaaggtcaggagttcgagaccagcctggccaacatggcgaaaccccgtctctactaaaaatacaaaaattagccaggtttggttatgggtgtctgtaatcccagttacttgggaggctgaagtgggaggattcttgaacctgggaggcggaggttgcagtgagccaagatcttaccactgcactccagcctggatggcagagaaagactgttaaaaaaaaaagaaagaaaggaaagaaagagggaaaagaagagaaagagacaggaacccgagagagctgtggcagaggtggagaccggtgaggagggaggcagggacggtccaggggactctgaaggaatggggttaggggacacaggtccagagagcaggacagtgactgggggagggccggctctagcagctgggcagcccatgggagacagagtcaggctacagtggtcacaggcctcagtcacaacagccctcccttctcctccaccccagacaccatctcccaccgagagtcatggccccattgggtgagtaagcaggggaggggctctggaacaagtgagtagaacccctctcccccgacctgccacaaccccgttgaccctgtcctcctcctcccagccctgcacctcctcgtcctcgtccccatcctcctcagcctggtggcctcccaggactggaaggctgaacgcagccaagaccccttcgagaaatgcatgcaggatcctgactatgagcagctgctcaaggtggtgacctgggggctcaatcggaccctgaagccccagagggtgattgtggttggcgctggtgtggccgggctggtggccgccaaggtgctcagcgatgctggacacaaggtgggaagcactgcttgcagtctacctggagtccctcctgctgcaggctggagtccctgggcacagggacacggccgcgttcctccttgagggggtggaggtggggatgtggggggagaggctatctttccctgtagtctgggggtgaggcccaagccccctgctgtcacatgtctccactgagaggccccagactttcctgtcccacgtttttcatcccagagggaagtctcactggctcaaagctcctctgtcctggggtggggcgcctgttggtggagagggaaactctaccaaggggatgtgtgccctgaggtctaaccactgacctactcactgcaatccgagaatgagaatgggccagcccaggggcttctacgcatatgggtcatctccgaactccccgagctgggaagtccctttgcagtctagctggcagccttcctcctgcagtctggaactgctcactcagttctgttcccccacctccatacagaaggggaccctctcctagtctgggtctgggccactgtggggatggaagaaggcagggggctggcacggggtggtagagggcaggggatggtcagtgggtggagctgaagggccctcctcgccccacggactccctcaggtcaccatcctggaggcagataacaggatcgggggccgcatcttcacctaccgggaccagaacacgggctggattggggagctgggagccatgcgcatgcccagctctcacaggtgacctagcaacccacccacctgtgtgcctagactcaactagccccccagctccatgcccacaccagagtgggcccgaacttccactctgactcccaaacccagcctccaaccccatccttcgcctaatcctcacctcagtcttgcctccagcgccagccctgggcctctggcaacactcgggccacctggtccaaccagacctccagctggccctgcctggtgcaaaagccagctcctgtgctggcccctccaggcctgcagctccaccatccccacaccctcaggcaccccagccccaggccccttcttcatctcaaacccccgtccaacccaaactctgtcccccttcccaattctaatctgggctctatcccactcttaacccaatcctaatcctggtactgccctgaggcctccagccttgtccccatttcattcccatcccccagcattgattaccccaaatctagccccacccccagcctcatgctggtccccagctactctcccctcccacccctcttctccaagtcccactagggaccaggccacccccactggagcccggccctcactcacccactcccctgatcaggatcctccacaagctctgccagggcctggggctcaacctgaccaagttcacccagtacgacaagaacacgtggacggaggtgcacgaagtgaagctgcgcaactatgtggtggagaaggtgcccgagaagctgggctacgccttgcgtccccaggaaaagggccactcgcccgaagacatctaccagatggctctcaaccaggtgggtaccgcctgcaccctcctcccgccctgacttctctgtcctcctcctaagctcgccccggcccggcttttcttctctctggcatcccttcagtcccctccatggggtggggcgcctgttggtggagatggaaattctaccaaggggatgtgtgccatgaggtctaaccactgacctactcactgaaatccgagaatgagaatgggccagcccaggggcttctacacatatgggtcatctctcaactcccttcttttttttttttttttttttttttttgagatggagtcttactctgtcacccaggctggagtgcaatggcgccatttcagctcactgcaacctccgcctcccaggttcaagcaattctctgcctcagcctcccgagtagctgggattacaggcgcccgccaccacgcccagctaatttttgtatttttaatagagacggggtttcaccatcttggccaggctgatcttgaactcctgacctcgtgatccacctgcctcagcctcccaaagtgctgggattacaggcgtgagccactgcccccggccccaactcccttctttagcttccccgtaaacactgctgaccccaaagctgcatcagcttttggcctcttcccctttcacccacacactgtcctggataacctccccagtctccacctctggcttaaacatagatccatgggctgatggagacatctgcctcccgagaccctgatctgtgtccctccccaggacactgggctcagaagcttcccctaaacctgttcctcctcccggtgcccccatctcacgatggccccaccatcccgcagtcacgggcagacccctaggagccatcctcctcctgacctcctcctcgcccacctcccccaccatcagtgcccacccctgccgcctgacgcttgtgccctgctcccctctgcctgccccagctcaggcctcctcctctgccctggaccctcccccagcctcctctcaagctgcccaggctctagtctccccagcctggtaccagaaacgtcttcccacacacccagagtgatgctgctcacagcccccagtggctccccgctgcctccaggacaaagtctgatcttttcaggctcagctttgagccctgactggccttcccttctgcacccctccagcctcatgctcttttctcctctaagaaatttttgtcctcatggtggtccacatgcccccagctctgtgttcctcacacccactatacctgtgtatcaccctccctttccagaatgcctttcccttccccacacaggaactcctgctcagccctcaagaactagctccaatgtcccctcctccaggaagccttccctgatacctttagggaggaactggccacacccaacatcccctccccacccaggtcagagcccacttgcccatctccccttctagaccaggatgggggccatgtccaggtcatttctatgccttgacactgactggtttgggagtctgagagatgcgagatgcatgagtgagtgaaggggcactgccttccctctgaggtcctggccagaagggggaagccaggtggaccaagaagaaggctgaaattagatgggggcagcaaggcttctgggagggggtgagattcgaacaaagtgctgaagaacacgcactcatgtgccacgcaaagacaggcagggaaacaataggtgccagatgtgtaggtgggagagccctgagggcaggtggtctgggcactgtacactgttcacagaaccagagctgccataaaagacatggactgaggtaagtggggatcttggttctgctgagattcagggcaaagagagtgaccatgaggccttccccagagagtcagaaggcgggtacctggcacgcagtggctcacgcctgtaatcccagcactttgggaggccgaggcaggcagatcacttgaggtcaggagttcgagaccagcctgaccaacatgatgaaaccctgtctctactaaaaatgcaaaaatgagccaggtgtggtggcaggcgcctgtaatcccagctacttgggagggtgaggtgggagaatcacttgaacctgggaggcagaggtttcagtgagctgagatggcgccactgcactccagcctgggcaacagagcgacactccatctcaaaaaaaaaaaaaaaaaaaaaagacattgaggggctagcaggggccttgaacatgaggctgaggggcaagaattctgtggctccaggcactggggagctacaggagggctgtgggcaggggacggacggtagataaacttctcagccatcatgccctgtcagcactgaccagtggcacaggggaccagcttctgtccgtggccacagtgattcaggcaacaaataatcactgagcccccgggaggacacagcacgcctgggaccctctcccagtctcctctccagctgcccacatccctgcctccatggagctcacagtctggctggctggctgaaaaataggcaaaataacacgcaaccgggatgagctgtgaccagccgggccagccgaatgaggggggatgggcggcgttaacagttcggtaatatcggaggagcagtggcatctgagttgccgtggagggcaaggcggagggcatggtgtgggcaaaagcccaggggcttgagagtggtgaatggccagccgtgggcagaaccacgaggagaagccgagtgtgggctccaggcccggcctccaccctggctgcccgggcagctcagcaccatgtctgcttcttccacaacaggccctcaaagacctcaaggcactgggctgcagaaaggcgatgaagaagtttgaaaggcacacgctcttggtaagtggggatcttggttctgctgagatgcagggcaaagagagtgaccatgaggccttccccagagagtcagaaggcgggtacctggcaccctagtcctgccaccgccttcctgcctgacccgggggctggacacgccccctgtctggacctccgtttccctcatctgtcagagagtggggacaggatcctacggtccaaggacatgtcatgggaccaggaggcccagctgcggaggggctctctcaggggtgcagcctgcctgggccctaacctcggcctgtgcccaacctgcaggaatatcttctcggggaggggaacctgagccggccggccgtgcagcttctgggagacgtgatgtccgaggatggcttcttctatctcagcttcgccgaggccctccgggcccacagctgcctcagcgacagactccagtaaggggcggggctggcgggcagggggggggggcggggggcaatcagggaaagtagcagggagtgggaggagcctctgggtctgggggcggggctgttgtgaagggcgtggcctaattgatggtcgcggggctaagggttcccagataaaggacacggcctaggggagaagtggtggggtccctggtgacacaatccactactcctgcggcctttgggatgtcagggacgggcggggtcgggagaggtggatgacgggggagcgggccggtgcccataagggccagctgccggggtgggtggggcaaggcagaggggcagggccgcagagcccaggtcacgcccccaccccgccccgccccgcctgcaggtacagccgcatcgtgggtggctgggacctgctgccgcgcgcgctgctgagctcgctgtccgggcttgtgctgttgaacgcgcccgtggtggcgatgacccagggaccgcacgatgtgcacgtgcagatcgagacctctcccccggcgcggaatctgaaggtgctgaaggccgacgtggtgctgctgacggcgagcggaccggcggtgaagcgcatcaccttctcgccgccgctgccccgccacatgcaggaggcgctgcggaggctgcactacgtgccggccaccaaggtgttcctaagcttccgcaggcccttctggcgcgaggagcacattgaaggcggccactcaaacaccgatcgcccgtcgcgcatgattttctacccgccgccgcgcgagggcgcgctgctgctggcctcgtacacgtggtcggacgcggcggcagcgttcgccggcttgagccgggaagaggcgttgcgcttggcgctcgacgacgtggcggcattgcacgggcctgtcgtgcgccagctctgggacggcaccggcgtcgtcaagcgttgggcggaggaccagcacagccagggtggctttgtggtacagccgccggcgctctggcaaaccgaaaaggatgactggacggtcccttatggccgcatctactttgccggcgagcacaccgcctacccgcacggctgggtggagacggcggtcaagtcggcgctgcgcgccgccatcaagatcaacagccggaaggggcctgcatcggacacggccagccccgaggggcacgcatctgacatggaggggcaggggcatgtgcatggggtggccagcagcccctcgcatgacctggcaaaggaagaaggcagccaccctccagtccaaggccagttatctctccaaaacacgacccacacgaggacctcgcattaaagtattttcggaaaaa

SEQ ID NO: 146 - DNA, 32567 bp, Homo sapiens
gctgggtccctgaatcaccgactggaggagagttacctacaagagccttcatccaggagcatccacactgcaatgatataggaatgaggtctgaactccactgaattaaaccactggcatttgggggctgtttattatagcagtgcaaagagttcctttatcctccccaaggatggaaaaatacaatttattttgcttaccatacaccccttttctcctcgtccacattttccaatctgtatggtggctgtcttctatggcagaaggttttggggaataaatagcgtgaaatgctgctgacacttccctgtgcatctcccacatggctgccaagtgccccttcctgctctgcagtacctgagtccagtcatgatgcagggagcctccccactagaaacagatggcactcacagatttaaagcagttggaagcaagtttaagaagggaaatctttttttttttttttttttttttttgagacagagcctcactctcatcacccaggctggagtgcagtggcgcaatctctgctcactgcaacctctgcctcctgggttcaagccattctcatgcctcagcctcccaagtagttgggattacaggcgtgcacccccacactcagctaatgtttgtattttttagtggtactggagtttcaccaagttgtccaggctggtctcaaactcctgggctcaagcaatcctccagcctcagtctcccaaatagctgcaattacaggcgtgagccaccatgcctggctgagagggaatcgttaagaaggagtgggcaggggcaagaacactgtcagagacagtgtgttggccacggctactacagcaaattggctgcttcctgtgatcgcacgggttgagggctcagttccacaaggctgccccagcatcagatgccagtcgcaagctcacgtggtgcctgtgcttctgacacagggctataaaaattgaggttcccatgatcccctccttgggttcaattaattttctagaatggtacctagaactcagggaagccctttacttacatgtgtccccttataaaggatattatagggcctggcgccatggctcatgcctgtaatctctgtgcttcaggaggttgaggggggaggttcacttgagcacaggagtttgagaccaacctgggcaacatagcgagaccccgtctcaaaataaagatataggatattacaaaggatagttatgaacagccagatataagagatacacagagggaggcctgggggaaggggtgcaaagcttccgtgtcttctctaggcactgcaccctctaggaagctccatgagttcagttatccagaagccctctgcatcccttttgggtttttatgggcttcattataaaggcatgattgggccaggcacagtggctcatgactgtaatcccagcacattttgaggctgaggtgggagaatcaattgagccctcaggtggcaactgaggctgcagtgagttgtgattgcaccactgtactccagcctgggtgacagagagagagcctgtctcaaaaaaaaaagacaaaacaaaaaacctggccaatacggtgaaaccccatctctactgaaaatgatcgtcacctgatccccaccccttgaagatgcctccaccctctccatacgcatttggtcagcactaactgccctgggtgacaggcacactgcactgggtgacaaggacccaaagctacaccagccagtgccccagccctcaagcacctccctgtgcagaaggaagacaacacagaaaagggaagcatggttgtcacagaggcccagaggactgctggctgatgtcactgaatggggaagtggttggccgcacaggccccaagctcagacctgatgccacagtggacgttcctgggccatgtgacctcaggctaggctcagaaccaccctcagggcctccgtttctttctgtataaattgaggaccatacagagatgctgcctacctcctgggattgtccagagagttaaaagctcttttaaaatgcgcctgctgggccaggcacagtgtctcacacctgtaatcccagcactttgggaggctgaggcaggcagatcacaaggtcaggaggtcgagaccagcctgaacaacatagcaaagctccatctctactaaaaatacaaaaagtagccgggcgggcatggtggcacgtgcctgtaatcccagctactcaggaggctgaggcaggagaatcacttgaactcaggaagtggaagttgcagtgagccgagattgtaccattgcactccagcctgggtgacagagcgagactccgtctcaaaaaataaaaataaatcaaatgcacctgctggcagggcgcggtggttcatgcctgtaatctcagcaactttgggaggcctaggcaggtggatcacctgaggtaaggagttcaagaccagcctggccaacatggtgaaaccccatctctgctaaaactacaaaaattaggtgagcatagtggtgggcacctgtagtcccagttactcgggaggctgaggcaggagaatcgcttgaacctgggaggcagaggttgcagtgagccgagatggtgccactgcactgcagcctgggcgacagagtgagactccgtctcaaaataataataataataaaacaaaatgcacctgccatttctttccatcaggtatggccatggaaatgagggtcataagggaagcagtgtatcctcacagatccccagaaacgagagacacagccatgcagggccacttgggaaagcaccagggtccctcagggagtagaggaagccaagggaacacaggggtgagaccctttgttatgctttccctggaaaaggcaaggaagggtatgcaggtttaggattggctagttagaataacgttagcaggctctggggattagaggctgtcatttgttatttggtgtctggcccaggatgatgaaggcagagaaatactgccttctgaagggtgagaggcagctagaagagctggttcagtgttggggccctggattagctggtttgcatatgaaaggcacactcagccaggagccgtggctcaagcctgtaatcccagcactttgggaggccgaggtgggcagatcacaaggtcaggagatggagaccatcttggccaacgtggtgaaaccccgtctctattaaaaatacaaaaattagttgggcatggtggcacgcacttgtaatcccagcaacttgggaggctgaggcaggagaatcgcttgaacccaggggtggaggttgcagtgagccgagaccgtgccactgcactccagcctggcagcagagtgagactgtttcagaaaaaaaaagggacactctcagaggggtcatttgctagctctaacaactggctggctctggcaggggcagtccctctctctgctcttggaggtccaagatgccagaatatcagcaatccagtggggcttggtgaggtggctcacacctgtcatcccagcactgagggaggccgaggcaggaggattgcttaagcccaggaacttgagaccagcctagacaacatagtgagaccccatctctcaaaaaaaaaaaaaaattagccgtgtgtggtggtgtgtgcctgtggtcttcactacttgggaggctgaggtcagcaaattgcttcagcccaggagtgatggtgatcgcgtccctacactccagtctgtggacactctagtaccttgaggacagtacagcctgattacagaagctttacagcaagtcttgaagtcaggtattataaatcttccaccttcattcttcatttgtaaaggccttttggctattctaggtcctttgaattactgtgagaatattacagttggcttgtgaactccacaaagcctatgggatgtcgattgggatcagaggaaagcaggaacggtgggtgccaaggagaggtgaggggctgggggcagggacggatgtggccagtgaggacagtaggatacttgttgggggaatgtggggacatccaagcagtggttctcataatgcggtgcagggtacttaccccctccctgcccctgctccccacacacgacttcccacgcctctcccatgagcacctgcactaaggggctgcatttaggctctgcccacattggaatcatgccctcctccaggccctcctcctcctctcagaagccctgtctgtgagagagccacagccccaggctcagtcccaggttctgtcactgctgttgggggagggaggatgaacaaatccaggagacctcacaccatcccagagcagaaatcctgacacagaaggaatctcccatgggggttcagctggatccagggcctgaaagtgacataaacatgcatgttgcatctaaggagactgcacgtggcagcattgggcagcatgtgccctccagagctacccagaggctgttggctataagttctatgtggcccccacattggacagcctggtaagcaggtgacctttcagccaggtcctcaggtggggcgggccaccctctcgaggccctgcccagacagccagggggtcccttgtcctctctgcagcccatctttccagctgtgaccagttcagcccaaagcccccgtccctcagtttccctgtgggttgaatggagataatgtgtcacctcagaatgttgtgaagcagagaatgaggtgtttagggcctggctcagacggaggggtttcctgagcatggggaacctgtttcctcaggcctgtaaagggagggagggcgggccggcctggctggccctgggaagcacagaggagcctactaggaccagggaagagactaagagaagggaggcccgtccctgcctgcttctgtctcaagaaggctgatgtcacttcctctgatgaaatcctgtcttcccccacggcccctcaactgatgccacctcaccctggagagggtgggcagagcctcctacggagggagccctgtgcaccaccaaagctccctgctccagtgaccacccccgggcaaaggccggcagatccccgttagagatgggcccaggactgtgtgtggggtgggtgttgctctgagccttcactttcttctgtgtccaaggaagcttctggatcagccaagggctcaggtgtgtggagggaatgacctgaggggctgtatgaagggacagcctcctgtcctgcactcagaagttgaggcccagagattccacccttcagccaggcccagacatctgggttgagggggctccagtcctgtacccactactgcaagtcacgtggcctggggcagggcttctcagagccctgtcccctcctgtgtagggcgggacgtcagaggggagcctgcagacccagtctcatgtcttgggggtcaaggggtggcttccagaaggaccagtctctgtgtaggggaccattagccccctcaccccttgagcaaggtcgtggtgcctgcaccgagagagggcctggggcaggaagaggccagctgggtcgtggtggtgcctggggactgcatgggagcccctgccagggagggagagggacagaggacaagctgggggctcttctgcttgggctgggggctgagcacctgtgacctccaccggcttccttctcctcctctctgaggactgaatctggggcgcagaaggacagagattcaggcctgcctttcctctccctgaaagagcctgcgctggccctgggcagagagaaggatgagaagtgaggctgagtgaggtggggtctgcagggatccaggtgggaggggcccagccagccaaggtcaggcccagccccccaaggtcaggcccagcccctcggcaggaggacggggaccgcggcctttgggcagggctgacttggcactgaccacaagggaggcccttttgcaataggggaaaataagccagatggataaaggaagtgctggtcaccctggaggtgcactggtttggggaaggctcctggcccccacagccctcttcggagcctgagcccggctctcctcactcacctcaacccccaggcggcccctccacagggcccctctcctgcctggacggctctgctggtctccccgtcccctggagaagaacaaggccatgggtcggcccctgctgctgcccctactgcccttgctgctgccgccagcatttctgcagcctagtgagtacccaggaccacccagatgtgggctctgcccaaaccacaggaggggccaacccgagacaaaggtgggacatcttggggagggcccaggctcccaccaccaggaaacaagggcgggtcccacaggggcgggtgaccccatcctctccccctcctccctcccccatgcctgaagagtgggagacccaggccagaggtcagtccagccacctgtcacacgactgcctgtgggtgaaggtgcgggagggtctggggtcaccctctttgtgtcttgaggtggtttcaaggtctctcccctactcactccctccctcctctaggtggctccacaggatctggtccaagctacctttatggggtcactcaaccaaaacacctctcagcctccatgggtggctctgtggaaatccccttctccttctattacccctgggagttagccacagctcccgacgtgagaatatcctggagacggggccacttccacaggcagtccttctacagcacaaggccgccttccattcacaaggattatgtgaaccggctctttctgaactggacagagggtcagaagagcggcttcctcaggatctccaacctgcagaagcaggaccagtctgtgtatttctgccgagttgagctggacacacggagctcagggaggcagcagtggcagtccatcgaggggaccaaactctccatcacccagggtgagtccagctgccctggcacccgctttgcccaccgcagtgaggcttttatgatcactggtgacatcgtccccagcacctcagaccccacttcttctgacgacccctaagttctctctttggcccctaacacttcctcaggcctttgccacctctccccttttctcttccccttgtctccacaactgatctgctttccccaaccatccccctcactgtcccctccagatccagccccgcccccactcctcaggcctcagcagctgctggaccctctaattatccttcattctttctccaaaatgaggctccagcctggcctctccccataacctccaggccgattcgatctctccaggatgtggctcacccgctctttgtcatgtgtctctgtgtggagtccccgttagtgcctcagggtgggccccataccttgcatctctcacagtcaggagctcattcaggaacccccagcaggtgcccagtggctggccctgggagccctgcagtccctgggtcaagccctatcacctgggttcccatctgcccacttccttctccccctctgcttcccagaagtgtccttcagctcctccctgacctgtctcgcctcttctctcgtgtatcatatccctctcttcctgcatccatcctttaccctcctcacttctccctggcccctgcagcccccactttccctgacaagcccctgggttcttccagccgtgctctccctgtcctccactctggtcttgctactctgtccttcccaacactaagggatgtgtctgcagaagcaagagcagcagcccccattcattgaggcaccatggcatggccctggcaaatcgcttcgtgtgcattgccctagtgaaccctcaccaagactccacaataacaagaggaactgctattctcttcagtttacagacagggaaattgaggctaacagagcctatatatctgtgcccaacatcacactagtggtgcagatgggatttggtagggatggtgagggatgggcatggtggctgacgcctgtaatcacaacactttgggaggccaaggtgggtggatcacttgaggtcaggagttcgagaccagcctggccaacatggtgaaaccccgtctctactaaacatacaaaaattagccaggtgtggtggcgcatgcctgtaatcctagctactcgggaggctgaggcaggagaatcacttgaaccggggaggtggaggttgaggtgagctgagatcgagcaactgcactccagcctgggtgacaaagtgagactccgcctcaaacaaacaaacaaacaaacaaacaaacacaatgaaagggatggtgagctgcagagctttctcacctaacctctagctacagggcttcgcctattgagttgaccatagtgttcgccttgacctacttttgaacctagtgatgggatgtgttgcactaatagatcttctgttttattcagaaagggcgtcggggaaatttgagcctgggtttatctgtctccagatcagtggggtgaggggagtttctcccaggcccaggcaggaagggggtgcattgtctgtagaaaatgttttaggaaactaatctttggccaggtgggtttgttttttctaatcacttgcactggcaatcctaaacaatgccagggataaattactcttccctgcagggacctgcagggacggacactctcgctgcctgcgccctggtaaaccactgcaccatcttaaccactgtgttggttttggagcagatggaaagtggctccataatctaaatgaagcaagacagccttgaactttgatttcctacatatttccttaaatggccttttttgagagatttgggtttttctcaggccttctcttcctctttccttaattcctgcttgcttttctcacctctctgcataggtcagatttgttgtttttttcactaataaattgtattttcaattaattcaattagttgaatattcatgcttattataaaaaacaaaattcaggaaagtaataaaaagagaaaaaagtgttttttttttttttttttgagacaaaatctctctctgtcacccaggctggagtgcaatggcatgatcttggctcactccagcctccacctcccaggttcaagcgattctcccgctcagcctccaagtagctagaattacaggcacccaccatcatgccaggctaacacagggtttcaccatgttagccaggctgctctcgaactcctgacctcagatgatctgcccagcttggcctcccaaagtgctgggattacaggtgtgagccaccttgctctgcctttttttttttttttttttttttttgagacaagagtctcgctctgtcacccaggctggagtgtgatcatggcttactgcagtgtcgacctcccaggctcaagtgattctcttgcctcagcctcccaaatagctgggactacaagcacgcaccaccacacctggctaatatttgtattttttttgtagtcatgggattttgctatgttgcccaggctggtctcaaactcctgagctcaagtgatccacctaccttggcctcccaaagtgctaggatacaggcatgagccactgtgtctggcaaaaaaattttttaatccagctgaagtaccatcatgctaagatgcaacaaactaaaggaatatttgtagcagatataactaagtttgttgttggcttattaatgttttttacataattttacttttgtaaccaaacctaattgtgttcttctttgtcacttttctatttctttttttttttttttttttttttttttgagatggagtcttgctgtgtcttccaggctggagtgcagtggcatgatctcggctcgctgcaaactccgcctcccaggttcatgccgttctcctgcctcagcctcccgagtagctgggactacaggtgcccgccaccgtgcccgactaatttttttgtatttttagtagagacggggtttcaccgtgttagccaggatggtctcgatctcctgacgtcgtgatctgcccgcctcggcctcccaaagtgctgggattacaggcttcagccaacacgcctggccttttctgttttatttctaagcacaaaaatccctatttccactataggttgaaaatattggccagacacagtggctcatgcctgcagtcctggctactcaggaagctgagacagaattgcttgaacccgggagtcagaggaggtttcagtgagccaagatcgcatcactgcactccagcctgagtgacagagcaaggcttcttaatttaaaaaaaaatttgtatgtagtgataatttattttggtatatggcataaacaactaaattgatctttatatgaaataatataatcagttgtcccaaccccatttattgcatttttatctgcttctctattgatacattaggcctggttttaaaattatttttgtagaaaagcatctgtttctggtcagtcgattctgtttcactgatctgtcttttcttacatcagcacacaggtttagtgattgtaactttatcacatttcaatgcctaagactattttcatctcaaacgtattactccttcctcaaaaacttttttaggcttggtgcagtggcttcatgcctgtaatcccagcactttgggaggctgaggcacgaagatgacttgagcccaagagtttgagacttaacatgggcaacatagtgagacccccatctctaaaaaaaaaaaaaaaaattagccagttgtggtagtgcacacctatggtcccagctactcaggaggctgagacaggaggatcgcttgaggccaggaggttggggctgcaatgagctgtgatttcgcaactgcactccagcctgagtggcagagcaagaccctgtcttaaaaaacaaagcaaaacaaaaaatatttttctgttgttgcctgcctgttccttccccaatgttagaataagtttatccagtttaggaaaaacaaaaacaaaaacaaaaaacacaacactcttttaagtcagttgcattaaacctattatgcaattgacagaaactgaaatcaggctaatacacaatcttcccatccaggaacaaggtcctattttatatccctcagtaaatcttggtagtattctgccaaacatcatataaatgtctcataagattgtttaactgtctgtagtgagctgagatcatgcaactgcactccagcctgggtgacagagccagatcctgtctcaggaaaaaaaagaaaaaagatttttttaccctccatatttcctcgttattaatatgcaagattactttatgaatccttaataattgtcattgtaaaagtaatgcataggcagccaggcgtggtggctcacacctgtaaacccagcactttgggaggtcaaggcgggtggatcacgaggtcaggagatcgagaccatcctggctaacatggtgaaaccccgtctctgctcaaagtacaaaaaaattagctggttgtggtggcgagcacctgtagtcccagctactccggaggctgcggcaggagaatggtgtcaacccaggaggcggagcttgcagtgagcagagatcgtgccactgcactccagcctgggcaacagagcgagactctgtctcaaaaaaaaaaaaaaaaaaagtaatgcataggccaggtgcagtggtttctgcctgtaatcccagcacttttggaggctcaggtgggctgatcacctgaggccaggagttcgtgaccagtttggccaacatggtgaaaccttgtctgtgcatggtggtgtgtacctgtaatcccagccactcgggaggctgaggcaggagaatcccttgaacccaggaggtggcagttgcagtgagccagatcatgccattgcactgcagcctgggtgacaaagcaagactctgtctcaaaaaaaggccaggtttggtgcctcacctctgtaatcccagcactttgggaggccgaggagggtagatcttgaggtcaggagttcgagaccagcctggtcaatatggtgaaaccctgtctctactaaaaatacaaaaaaattagttgggcgtggtagcacgcgcctgtagtcccagctactcaggaggctgaggcagaagaatcgcttgaacctgggagacggaagttgcagtgaaccgagattgcaccactgcactccagcctgagcaacagacggagactctgtctccaaaaaaaaaaaaaaaaaaaaaaattaatgcataaatctggccaagatggtgggttatatgcatgtttaccaccaccctctcccagagtctactaaaatgatagcaaagggaattttttaagaaagaaatcctcaagaacaagaaatatatgaactggatgtacaaaagcaaaatttgacaagctggaaacagactaatggaattggtttaggagcccagatgagctaaaccctaagccagtgttgggaaacccagatgaatggcaatttataccacaaaactctgtaaagtttcagtaatgctggccccgagtacccctgaaagtaggagtgaagatgggtctgaaaactagaggacattgaaaatctacgtcagaagcagggaaacctccattccccattcccctaccctagcccaaagacgagaggtttgctttccagaatagatgaaccagagggcctctgggggagcaccccagggataactggcaaggcgactggggtctggtcctcataccgaatcccccagcaccggggactatatcttggcctcatctgtgtttgggaagcctaaggctagagtccctatatgattaaatgaaacaaacttctcccatgaaacgcaaagaacaaaacaaacaggaaaaacagaaagaggaacctggaagaaaccaaaacagttcagggagaataaaactttaaaatactcagcatttccttctactcagaaagctaagagacctcgtgcatgtgatgagagggtgctttacaaaggaacttgccaaccacaaagaaagctctgggaaatttaagatacaatagcaaaaataaaaaattccattaaagggctgggcgtggtggctcatgcctgtaattcctgcacttagggagtccaagacaggaggattatttgaggccaggagttcaagaccagcctgggcaacatagcaagaatctggcaacatagcaagactctgtctctataaaaaaatacaatttaaaaattggctgggtgtggcctgtcgtgatagttcacgtctgtaatcccagcagtttggtaggccgaggcgggcggatcacttgaagtcagaagtcgagaccagcctggccaacacagcgaaaccctccctgtctctactaaaaatacaaaaaaattagccaggtgtgctggtgtgtacctgtaatcccagctacttgggaggctgaggcataagaatcacttgaacccgggaggaggaggtggcagtgagctgagatcacaccactgcactccagcctgagtgacagagtgagactccatctccaaaaaaaacaaaaacaaaaacacggtggctcacgcctgtaatcccagcactttgggaggctgaggcgggtggatcacgaggtcaggagattgagaccatcctggctaacagggtgaagccccatccctactaaaaatacaaaaaattagccgggtgtggtggcgggcacctgtagtcccagctactcgggaggctgaggcaggagaatggcgcgaacccgggaggcagagcttgcagtgagccgagatcgcgccactgcactccagcctgggcgacagagcgagactaccgtctcacaaaaaacaaacaaacaaacaaaaaacaactagctgggtatagtggcacatgcctgtagttccagctactcaggaggatgaggcaggaggatcacttggggctgggaggtcaaggctgcagtagctgtggtcccaccactgcactccagcctgggtgacagagtgagatcctgactcaaaaaaaaaaaaaaaaaaaaaattaaaaaaacccaccaccaccaccaaaacaaccaaaaatgcacccaaggatgaaatttacttttgagtgtgggaataaatatgtaaatgtgagaggtgacagcgtgctgtcagccctcgctcgctctaggcgcctcctcggcctctgtgcccactctggccgcacttgaagagcccttcatcccgccgctgcacagtgggagccccttcctgggatggccgaggccagagccggctccctcagcttgcaggcaggtgtggagggagaggcgcgggcgggaaccggggctgcgcgcggcgcttgcgggccagctagagttctgggtgggcgtgggcttggcgggccccgcactcggagtggccggccggccccgggcagtgagggacttagcacctgggccagcagctgcggagggtgcgcctggtgccccagcagtgccagcccaccggcgctgtgctcgatttctcgccaggccttagctgcctcccggcagggcagggctcgggacctgcagcccgccatgcctcagtccccacccccacccccaccccacccccgtaggctccagcgcggcccaagcctccacgaggagcgccgccccctgctccacggcgcccggtcccatcgaccgcccaagggccgaggagtgcgggagcaaggcgcagaactggcaggcagctctacctgctgcctggttggggatccaatgggtgaagccagctgggctcctgagtctagtggggacttggagaaacctttatgtctagctaagagattgtaaatacaccaatcagcactctgtatctacgtcaaggtttgtgaatgcaccaatcagtaccctgtgtctagctcagggtttgcatatgcaccaattggcactctgtatctagctaatctagtgaggacttggaggacctttatgtctagctaagggattgtaagtacaccaatcaccactctgtatctagctcaaggtttgtgaatgcaccaatcagcgctctgtgtctagctaatttagtggggacttggagaacttttgtgtctagctcagggattgtaaatgcaacaatcagcaccctgtcaaaacggaccaatcagctctctgtaaaacagaccaatcggctctctgtaaaatagaccaatcagcaggatgtgggtggtgccaggtaagggaataaaagcaggctgcccccctgagcagtatcaactggctctggttctcttctacggtgtggaaagtttcttttttttgcttttgctttttgcactaagtcttgctgctgcttgctctttgggtccacactgacctttatgagctgtaacactcaccgtgaaggtttgtagcttcactctggaagccagcgagaccacgaacccataaaaaggaagaaactctgaacacatccaaacatcagaaggaacaaactccggacacgccgcctttaagaattgttaacactcaaactgcaagcgtccgtggcttcattcttgaagtcagtgagactgagcactcaccaattctggacacaaatggatcaattctgtttgtgtcaggtgatggtgaaaagagaaaagagtagaactggagtgagtgggacagagattgctaagggtggccctgtattcacattgaacagggaaggctgctgtgagatgaagcagagcctggtgtagggtaactggggagaccttagagtgaggcacacttggggaaaccagtcagggacggggaggtaccctgggaccagcagcaggcctctgaaaagcaagagacgggagcccagagaagacagaaatgtgtagagaggaactgtggcctctggagtcagaagttgttacagggcacccgagcccacagatggggtcctccaaggccagctccaaaggcacaacgcagggatagaagaactgggagcagacctggagaagccccaggaagatccaagctagacactgattggtagaacgtaatggggaggttgggagaagaatgttccagtcacatgggacaagtgtggctgaagacagggaagaggcagagggtggaaggaggcggggaagatcctgtgtggctttgaaagccaaggaaacaactcacttttgctctgagtgccatgggagcgaaggagcgtttcctgcaggagtgctgagatctgactcacactttttttttttttttaatttttttgtgatggagtctcgctctgtcgcccaggctggagtgcagtagcatggtcttcggtcactgaacctcttgcctcctgggttcaagggattctcctgcatcagcctcctgagtagctgggattacaggtacctgccaccacacccggctaatttttatgtttttagtagagacagggtttcaccatgttggccaggctggtctcgaactgttgacttcaggtgatccgcctgcctcggcctcccaaagtgctgggattacaggcgtaagcctccatgcccggccccaactcacagcttaaaagcatccctctcgctatggtatggaggaaaaaattataggtgagcgaagtcagaagcagggagactggggagagaggacgcagcttggcttagcgagatggcagtgcacgaggtgagagttggctgatactggttatattttgaagacagggcagacaggatttgcagatggattggatgtggggtatgagagggaggaaaggaaggatgactctaaggtccttggcctgagcatcttgaaggacagaattgccatttactgagtgggggaaacggaagaacgggtttagggggaaatcaagaactctgttttggacatcttacgtttgagtcgttactagacatacaaatggaggtgtgaacaggtagatctctgagtctagagtgcagggggaaaattggctggatatatcaacttggaacccagcctgggcaacataatggaaccccgtctctaccaaaaaaaaaaaaaaaaattttttttttttttttgagacggagtctcactctgtcacccaggctggagtgcagtggcatgatcttggctcactgcaaccccggcctcctgagtagctaggactgcaggggagcactaccacacctggctaattttttttcatttttagtagagatggggtttcaccatattgctcaggctatccacaaaaaaatttttttttaaaaattatctgggcatggtggtgtgcacctgtagtctcagctactcaggagggtgaggtgggaagatcgcttgagcccaggagttggaggctgcagtgagccacggttgcactattgcgttccagcttgggcgacagaggaagaccaatcaggataccactgatatttaatgtcacacagtgaatgagatcatctgggaagtgagtgtggctagagaggaagttttaggactgggccctgacattaggtttgggcagatgaagagaaatcaacagagacgtctcagaaggagctaagtaagagtgaggcaggagaaccaagggagatggtgtcccagaagccaagtgaataactcacttcacaaaagggagagtgaggagtatcaaatgctgaaaagctgagtcagataaagaaaatgggggtttaagatctaaattctccatgtcaatagtaggaagtgagtagataccatctaaaacaagcaaatcaagcaacagcaatattcgcatgctgtttagaaatagaaggttaacacaaaaataaatagctaaagttgctgaaaatagttgcctctggggagttggaagggagtgaggaggcaggtgcaggaggctgctgtttttttctaagttgtgtgaaatttgttgggtctgaattatgtgccgattgtatcttgtacttgatgcgattgtatcttgtacttgtacttgattgtacttggaaaaagtgttaaatttaaaaactaataaaagtactggtaatacttacacataatttaaaaaaatacagaaggaagtcaaataaaatgtaacattcacctaatctccccagtccctaccactttgtgtggaagtgttctctcacagatacagacatacaacacaaatggaattaaaccacatactatgctgctctagaaattgctatttttacttaaagtaacttgaatctctttcattccagtatatatacatctatgtctttttattttttatttttatttatttattttgagatggagttttgctcttgttgcccaggctggagtgcaatgacatgatcttggctcactgcaacctctgcctcccgggttcatgcgattctcctgcctcagcctcccaagcagctgggattatagccatgtgccaccgcacctggctaattttgtatttttagtagagatagggtttcaccatgttggtcaggctggtctcagactcctgaccttaagtgacccacccacctcagcctcccacagtgctgggattacaggcgtgagccaccacacccggcctatgtctttttttttttttgagacggagtttcaatcttgtcaccaaggctggatgaggtggcacgatctcagctcactgcaatctctgcctcctgggttcaagtgattctcctgcctcagcctccccagtagctgggattacaagcacgtgtcaccatgcccacctaatttttgtagtttcaccaagttggccaggctggtctgattcctgacctcagatgatccacctgccttggcctcccaaagtgctgggattacaggcacaagccactgcgtctggccatttaaaaaaattttttagctgctcttcgcagagcagggctaactcctagtcattgtgctctgaatcagcaatgcctttttaaatggccgcatgcatcccatggtagtgatgtatcataatttatttaatccctgtcccagaaattagccaggtgtggtggcatgcacctgcaatcccaactatttgggaggctgagacacgagaatcccttgaagcagggagttggaggttgcagtgagccgagattgtaccactgcactttgttgttgttgacagagtgacactatgtcaaaaaaaaaaacaaaacacaaaaattttggttttgagacagggtctctctctgttgcccagactggagtgcagtggcacaatcatagatcactgcagcctcaacctcctgggctcaagcgatcctcctcctgaggctcctgagtagctgggactataggcatgtgccaccacacccagctaatttttgtatttatcatagggaccagggggagcgggggtctcactgtgctgcccaggctggtctcaaaactcctgggctcaagtgatctgcccacctcggcctccaaaagtgctgagattacaggcatgagccacagtgcccagctttaaaaaaaaaaaaacgaccaaaaaacttttgaatggatattagcattaggattatggaatcattttatgaaatggattcaaattgcatagttttccatctttatgttctggaaacttctatgtgagaattctatgttccttaaatttttacaagaatttctttttaaaacttcctaagcatggagaccttatgaaaggtagttcttgcatagcattctcatttcttctctgtctaatgatcagttaactcatttacgccagaggctgcaaattttttgtgtgaaagatcagaacttggcgatgaccttgagcagtaggatataaataactcccacaaacttagcgttctaataatagaacactaggcataaatgagttaaggtatatactacttcttcgtttgagacagaatcttgctctgtcacccaggctggggtacagtagcatgatcttggctcactgcaacctccgcctcccaggttcaagtgattatcctgcctcagcctcccaagtagctgggattacaggcacccgccaccacacccagctaatttttgtatttttagtagagatgggctttcaccatgttggccaggctgctctcaaactcctgacctcaggtgatctgctcacctcagcttctcaaagtgttgggattacaggcatgagccactgtgcctggccccaaggtatactagttcttaaatcaatttttaaaaatatcacccaggcctggctcagaggttcatgcttgtagtcccagctaatcaggaggttgaggtgggaggatcacttgagcccaggaggtggaggctgcagtgaggtacgattgcgcaccccagcttgggcaacagagcaagacggtgtccaaaaaacccaaaagacacccatttcacagatattttaacatttaacaacatataattgagcatatacccactcgtgactgcagctggcttttgttgtcattaggtttgctagtcttgtctatcttcttcttgttgctcctttaaataaccagtttctgcatttattttgcctgtggctatctgttccctaatttattcctacgtaacttttcattactttcttcctctgagtttctttacagctggctcctcctgtttggggttttttctttggaaactgaatattttatttgttttaaaaatttcttcccattttaagtaataaatccatttcatacaatgaatttagcttagagtgttgctttagtcatactccagggttcttttttaaaatatgtattactctagtttttattttctaaacagtatgttattatacatgttttcctttaagtaattaaaacattttaaaattcccaatcaagacatagcatttacacttttattactttctcttaagagtggatgaagattttagttcatactaacttgaagacattaaggagcctgatttttttgtcctgtggctgagtactatgtcaattttttaagggtgcgtgaaacatctataaagaaggtgtaacttgtttgtaggatgtgaaggtcaatatatattaatgtgaccttaaaaacatattttcaatatacagtaggttttttacagatgtgttctcacttattaagacaatcctggcttggcacagtggctcacacctataatcccaacactttaggaagctgaggcgggcagatcacctgaagtcaggagttggagaccagcctggccaacatggtgaaaccccgtttctactaaaaaaagaaaaaaaaaatacaaaaattagctgggcatggtggcatgtgcctgtgatcctagctactcgggaggctgaggtaggagaatcacttgaacttgggaggcggaggttgcagtgagccgaggctgcaccactgcactccatccagcctgggtgacagagcgagcctccgtctcaaaaaaaaaaaaaaaaaaaaaaaaaaaaagacaatcctgtaaaaacacactgtatgattcagctaatatgaagtatttagtcaaactcatggagacagaaagtagaggggtagaagggtggggacacaggaatgaggagttgtttaacacgtgaaatgtttccattgaggtggattgttaagccaatgacagaatttaaaccacagacttactttgatagtactcttaatggtataatttcttctcccattttatgtctctctttatgttttttcttatgtttcctttttgttttcaagagagagctatcttttagatctccagtatccttttcctcttcagtagagatttctatatcttgaaataaataaaaaagcactccgttaagacgtggggctgtgaaatgggtgaaatcccaaagactctttcaattcatctgtgattaacatttttgggaagtaactcctattataaattaaaagtaatattagagtttttcacaatcagaatgtcaataaatttttaacttaaaaaaaatgtttccattgaggaagatgcaagggttctggagttggatggtgtgatggttgcacagcactgtgaatgtgcttgatgccactgaacggtgcatgtagaaatggttaaaatgacatattttatgttacctgtattggcaacaatagactttttttgatcctgtgatttagttatccctatttgtgagtgaggagatgaggttctgaggtcaccctgctgataactggtatagaatcggatttaaactgagttgcctgttaagctgaatttgaggaggaagaaataaaattaaaggaaggaagaaatggaaggaaggaagaaaggaatgaaggaaagaaggaaggagggagggagggagagaggaaggaaaggaaaggaaaggaaaggaaaagaaggaaaggaaaaataatataaaatgaactgagtcgtctgcattgaaagctgttaacatttcaccctgttccccgctccctgtgtgggcttcagagaggagctccctcaccactaatgtcccccaacctagaaagcagcacaccacgcctttcacccagacaccctgtgcccccaggggagggtctgctcattcctcatctctccccagctgtcacgaccaccacccagaggcccagcagcatgactaccacctggaggctcagtagcacaaccaccacaaccggcctcagggtcacacagggcaaacgacgctcagactcttggcacataagtctggagactgctgtgggggtggcagtggctgtcactgtgctcggaatcatgattttgggactgatctgcctcctcaggtggaggagaaggaaaggtaagtgcccaggacccgccctctccccaagcctcccatctgggggtttctcaaagcccacctgcagctatggggctcctgaaatatgcagaccctgctggctcccctcaagcccaccgaggccgacttcgtggcctatgctgaggtgtctgcatttgtgaggctcctgcagtggggcggggcagggtcacatgtgagagcccacagcccttttcacacagccgatccccccctagttcttctctctcagtcatcactcatctacctcccctgaaggttcctggggaggagaggggagggtctgccctgggaaaaggagagagagagcagaagggaccagaagtaagctgagctcagcaggcactggccaactgcccacctgccacggcctggcttgaaactgcagaagcaaagtagataaagcataaaccatagactctgctctcagggaactaggggtgtggggttttcagttgcctcaaggactaattgcttcattgagaaagaactatggtagcacttaataagggtgggaagaaggagaggtaatcagagaggacttcccagaggtgatatatgcaaaagtctcaaagaagaaaaagaattagcctggcaagtggtgagggtggtgtagaggtcactcactttccttgtgggtggaggaaaccattccaggagctgcaggaagctcagtgctggtggaggaggcaggaaaggagaggaccttggaaatcacacccaagagcctctgatcccagaggcagcatgaagcagtaaagggtgacctcagctaccgtgagagacctcagtctatggaggagtggccagaggtgggccaggctgggtcagtgcagtgcaggggtgaggtggaaagaggaaaagggccagatcctggaaaagattaagtaataaaaccaaagaggtgaggtgcgttgaggtggctcacgcctgtaatcccagcactctgggaggctgaggcaagaggatttcttgagcccaggagtttgataccaacctgggcaacacagggagaccctgtctctacaaaataataataacaataataataataataataattattattattattattattattagctgggcatggtagcctgtgcctgtggtaccagctactgggaggctgagatgtgaggattgcttgagcccaggagtttaaggttacaatgagctgtgatttcaccactgcactccagcctgggagacggagcaaactatctccaactaaatataaaaataatttaaaaaaaattttttataaatgacacttggttggttgggcagggtggctcatgcctgtaatctcaacactttgggaggccaaggcaggagaatctcttgagccaaggagttcaagaccagcctgggcaactttgcaaaaccccgtatctacagaaaatacaaaaattagctgggtgtggtggcgtgcgcctgtggtcccagctactccagaggctgaagtgagaagactgcttgagcctgggaggtcgaggctgcagtgagccatgattgtgccactacactgcagcctggctgacagagcaaaaccttatctcaataaataaataaataagttgattgttagattgatgtaggggcgagggagcaggaataagcccctgtttccacttgagtggatgaggctgtaatgaaatcaccaagtacaatggggaagagaggagatcatgcttggaggggaacgatgcctcatttaatttgggatctgttacactggagatccatgtgtggcatctcagcagagttgtccattggaaactcagagtacacatttacagttcaaaagagaggacaaggcctgaggcattaatgagttccaccccaacatcctccaaacctgatctgaagttaccatcaagaatgtttgcaatgggctaggcatgatggctcccgctcacgcctgtaatcccagcactttgggaggccaggctgggcagatcagttgagcccaggagtgtgagaccaacctggccaatgtggtgaaaccctgtctctactaaaaatacaaaacttagccaagtgtggtggtacgcacctgtagttccaactactggagaggctgaggtggaagaattgcttgagcttgggaggcagaggttgcaatgaactgagagagtaccactgcactccagcctgggtgacagagtgcaaggagatttgccctatcagctatgaaagcacagaggggaggagcatggggttggggctgcctgcagtcagatcctggcctcacaccttcgccagggaaacagccttgttggtacaaaggctgtgcacctcaccttcctcatgggcaaagggagtgaagatagtacctacgtggggttgtcctgatgattaaatgtactgtgtttagatcttgcagagggtgtgccacaggagcatcagcagttagaatgactaaacagtgggcattaaaccagggaacactggctctcatgggagcaccatcgtatgaatacatttaaaagacaaaacagtacaatattggcatattcatacacagataaagcaatggaagaaaagaggaaaacctaggtataacagaatgaaaagagacccaaatatatgtgggaatttagttggttaaaatgtttctaatcaatgaggaaagatgagtaattccatgaatggtgctggaactattcagtagccatctgagaaaaaataacattatctccttacctcataatttgtaccaaaataaattccacagggatcaaagatttaaatgagaaaaaaaataaccctagtaccagaagaaaatgtgagattatttcataagcagtagagacagtcttcctcagtatgaccaagccccaaagccatggattaaaatattaaaatctggccaggtgcagtggctcatgcctgtaatcctaccactttgggaggccgaggtgggcaaatcacttgaggtcaggagttcaagaccagcctggtcaacatggtgaaaccccgtctctactagaaatataaaaattagctgtgcatggtgatgcgcccctgtaatcccagctacttggggggctgaggcatgagaatcgcttgaacctaggaagtgaaggctgcagtgagctgagatcacaccactgcactccagcctgggtgatagagcgagactctgtctcaaacaaaaaaaaaaaaattaaaatcaaccacttatgattttttttttaattctgcagaacaaaaaccacagcacttttctcctgagaatgaataagagggtcagggaattgaagagaaagtttgacatagtcactgaggaaatgggaagtggagtttgaggattcagctcagatacgaaactgtaaatctatgatagcagtgttgtgcatggctgcatttttccccagcagtagtcaaccattcagattttgagaccttagtgatttgtgttggtcaggaattgttgtcagttgctaccaccagggaccagaagtaaaagtagcttaaacaagacagagttgggttatttttttcctcttgtaaacagatctggaagcagacagcacatcactgttcttagacactcaggttcctacctttctgattcaccagccctgatgctggcttctgtcccaaaggttgcctcatagcccaagacggctgcaaggattccagccactatttctgggttcctggcaaaaaataggaggaaggaagaaaggaaaaaaaaaatactatgcctcaactctctgttcccttttaaagagtctttctgaaagacctaacaacaacttcttcacgtgtgagagccccggccctctccacacagccgatccccgcccctccgacccagtttatatcttattggctagaatttggtcacatatcccacagctatctgtagggggaaccctcccactccaaatacaatcaattttctgtaactaagaataattgaatagatattgggtaatcaaataccatttctgccataagacacccccaggattagagacttgccagctaagtgtggcagaaagacaggagatcacaggtcaaggagctagtgagaaggcaggaatgaagagcagaggggtcagcagggagtctgaataatctgtagaaaagtagattatcacgggataagagttcaatgaagtctaagagcaggtacagtggcataatgacaaaagacagctggaatgcttccaagcttattctgtgaggtcagcattaccatgataccaaagccaaacaaagacactacaagaaaaacaaaaacagaaacaaaacaaactacagaccaataactctgataaatattgatgtaaacatcaacaaaataccagcaaaccaaattcaacagcacggcaaaagaattatacaccatgggccaggcacaagaatcactcaaacctgggaggcggaggttgcagtgagccgagattgtgctactgcactccagcctgggtgacagagtgagattctatctcaaaaaaaaaaaaaaaaaaaaaaaaggagctgaattgaaaaaaaatagattaatataccaacggaatagaatacagagtctagaaataaacccttgcgcatatggtcaaaagacttgacaagggtgccatgagcacttaatgggcaaaggacaatctcttcaacaaatggcattgggaaaactgaatatccaaaccaaagaatgtagttggatccttatcttataccatatacaaaatttaactccaaatggattaaagacctaaatgtaagaccccaaaccatagggaaaaagcctcatgacactgggtttggcaataatttcttgcctgtgataccaaaagcacaagccacaaaagaaaaaatagacaaataggacaacattaaacttaaacatgttttttcattacaggacacaatcaatagaatcaaaaggcaacctatagaatggggaaaatatttgtaaattatatatctgataaggagtgaaaatctgaaatatataaaaattcctataattcaacaacaaaaaaatcaacccaatttaaaagtgggcagtggattttaacagacatttctccagagatgatatatgctatggtctgaaatgtgtctcctcaaatcatgtattggaaacttagtccccagtgtgacaactgggaggtagtgtgttttgggaggtgcttaggtcatgacggctctgccaaacggattaatgccattataaaaagggatttcaggagtgggttcactgtcttctaatcttctgccatgtgaggacacagtaatcctcccctctgaaagacacagcaaaaagcaagatgctggcaccttgatcttggatttcccagcctccagaactgtgagaaataatttttgctttgctttgctttgttttacttttcagcaacctcttgtccaacagaagaaacaaatttgtttttttataaattatacaggctcagatattcttatatacattagcagcacaaaatagactaagacagtatacaaatcaccaacaagcagatgaaaatggccaactaatcatcagagaaatgcaaatcagaactacagagagctatctccttatacccagaaggacagctactatttaaaaagtgtgtaaatgacaagtgttgggaagaatgtgaagaaattggggcccttgcgcactgttgatgggggctataaaatagtgcaaatgatacagaaaaaaagcatggcctttcctcaaaaatttaaaaataaaggccaggagtggtggctcacacctcaaattccagcactttgggaggctgaggtggcagatcacctgaggccaggagttcgagaccagcttggccaacatggtgaaacaccatttccactaaaaatacaaaattagctgggtgtggtggcgggcacctgtaatcccagctactcaggaggctgaggcaggagaatcacttgaacccgggaggcagaggttgcagtgagctgagattgtgccactgcactccagcctggatgacagagcgagacttcatctcaaaataaataaataaataaataaataaagctaccatacgatccagcaatcccacttttgggtacataccaaacagaactgaaaagaaaggtcttgaagagatattgatacacccatgttgatagcaacactattttcaatggccaagaggtggaagcaacccagatgtccatcaatgaatgaatggatgaacaaaatgtggtttatacatataatggaatattattcagtgtttaaaagaaattctgggccaggtgcagtggctcacacctgtaatcccagcactttgggaggccaaggtgggtggatcacctgaggtcaggagttcgagaccagcatgaccaacgtggtgaaaccctgtctctactaaaaatacaaaattacccaggcctggtgatgggcgtctgtaatctcagctacttgggagcttgaggcaggagaatcgcttgaaccagagaggcagaggttacagtgagcctagatcacaccactgcactccagcctgggtgacaagagcgaaactctgtctcaaaaaataaagaaaaaaagaaattctgacacatactacagtataaacgaaactggaagacatcaagctaggtgaaataaggcagtcacaaaatgacaaatattgtatgattccacttttcggtggtgcctagagatattaaattaataggaacagaaagtagaatggtggctgtcagaaaccgcagggaggagggagtaggggttctttaaaactgtttcagttttgcaagatgaaaaggtcctggagatgtttcacaacagtgtgaatatacttaacactaatgaactgtacacgtggttaaaagtgaattctagtgttttgtttgtttttttgttttttttttaccgtaagtaaaataaaacataacctaaagagagggaaaaaacagagggacagaagagtgctggaaagaaagctgcagcatggaaatgatactagcaattaatatttcagagttctcagtctaaacattaaaaaaaaaaaaaaaagtcctgtagaagtggaaggggaggtccctggagttgaggggtacctcaaggcctgggttcagagggtgtctctgtggacatggagccctcctgggaggaggctagatggtggaggggatgtctgtggaccaggagcccactgcttgggaaacactgcaaggatgccacggggatgggaggggcaggacacaatgggagaggcagcagaggattcagggtgggaccagccagaggggaggggaagcctagtggtggcaacagaatttgaacagccacaaacatgagtcccaagcacgacgctcccaaggctggagggcagacatagccgccacccagaaggaaagcacaggcacggtctccctgaggacctggagggaatgggggcggggtgccaatgtcaagggaaggggaggggaggggagaagtgactgggcgagggctcagcggtggagggagccaggttggggctgagcagagagctcaagagagaaagaaaccaagggagggggtcagggtgaaggggtctcaggaggtgacatggaagacaacagggaggacaggtggagacctcagggtgccggctgagtcccaggcccttcctgatgggtttgggtggagcagctctgctgctccggtccctctaaggagggcctcagcctagggcgcagcagagaaggtgggatggagactgccatcacccggatgccaccctgactcactgttggtccccctacaggtcagcagcggactaaagccacaaccccagccaggtgagtgctgggcctccccagggtgggttggggggtgcatgtgcaggcagtgggctgatttgggaaacagggagtgtgctgctaagaaccccacaaacccagcctgccacggccattgttgcatccccaacttacccatccttgttctcctttgtcctctaggggccaggctcttgaccttgggctttctgtcccctaaatactagactagtggactccaggttccagcacaaacattcaagaatctcttttctggagtgcccatctgtgccctctgcctgcctttcctggtgttattaagcttttcctgctctttacctgcttcctctcagcctggatcttccagcttttccatattgcctactctgttcaatctgtcctgttcccctgctgaatgtgcagggaactccaggcttcctctgcctccagctcctctccccgcctgtgtttgctcaggagggactcaccagcctctgcctggctcccctctccaggctagggcctcacttttcctttttctgggctcttcctctccaccctcccacctctctttcctttcctctggcccctcctttccatagccgtaggtctcctgctggaagaaagcctcacccctaccctttctcctgcactggcttttgccagctgcccttctcctgtccccaacccttctctatccattcacccagcctgaacccctccctgatcagaagacctgaaattcacgcaattgttttgcttctcccagttttagccaaggcagcgccagcagagagaaagcaaggattgacctttttcctatttttattctccgtgttcctctctcatacgagcaacttctctagaagaacccaactcactgagcaccgagggacctctgctaagccacacagattgcccctaattcctcttccaagcagcctccgagtctaaaaccatcacacccatcctgagcagggtggacaggttgcagagcactccccaaagagaaccaacccctaacacgtgtcataactctttcttcaattttttttttttttaatttttgagagagggtatcgctctgtcacccaggctggagtgcagtggcgcaatcatagctcacagccttgaactcctgggctcaagtgatcctcccacctcagcctcctgagtagctgtgaccacaggcacacaccactacgtctggctagtttttgtatttattgtagagatggggtctcgctatgttgtccaggctggtcttgtactcctgggatcaagcaatggccacctgcctcagtctcccaaagtgctgggattacaggtgccaccacccagcccatgtcttaaaatgcccaacctctaacatatttcctgtcctcttgttcccatacagggaacccttccaaaacacagaggagccatatgagaatatcaggaatgaaggtgagtccttaccaccatccttccccagtttctacccctggcacttcctgtttccccaaataccccctacctgggtccgtgcccctgtcagtattttcttctttccattccttgccccttgccctcacgtgaccctggccctgacctagcagataacctcactcctagagccccctgcccatctctctcccctggctgtcacgccacctgaccttggcacaccttgctttttattcttaggacaaaatacagatcccaagctaaatcccaaggtaagcaatcagaccagggcctgaaggaattaaagagaagcctggagaaggtggggtggaagggagaaggggagtgtggtgtgggcaggagagtcaaactgtaggcttgccgctaagatgggaacagctccgtctccactgtctaaccctttctctctgggttctcgcccaggatgacggcatcgtctatgcttcccttgccctctccagctccacctcacccagagcacctcccagccaccgtcccctcaagagcccccagaacgagaccctgtactctgtcttaaaggcctaaccaatggacagccctctcaagactgaatggtgaggccaggtacagtggcgcacacctgtaatcccagctactctgaagcctgaggcagaatcaagtgagcccaggagttcagggccagctttgataatggagcgagatgccatctctagttaaaaatatatattaacaataaagtaacaaatttaaaaa

SEQ ID NO: 147 - DNA, 180218 bp, Homo sapiens
ctcagcctccctcagcgtccggagtagctaggactacaggcgcccgctaccacgcccggctaatttttttgtagttttagtagagacggggtttcaccgtgttagccaggatggtctccatctcctgacctcgtgatccgcccgcctcggcctcccaaagcgttgggattacaggagtgagccaccgcgcccggccggtactgctctttaaattttcataagtcagaaaaaactcgaatacctttatatttaattcctggtttgtgaagttttagggctttaaatactttaaactatattgtcctttcacctctttcccccccttattcggataactataaccgaaaccagcttcaacacggagaaaaaggtttaaaacatttgcacaaatactaaatgcaaatatgcaacacatttcccacataatctaaaagaaaaaagaaaaacaactcagatgagactatcttataacagggctctttgtatttagaaagtgtggtggtggtggggacaacttctgttttaagtgctaaatccagtgggaaaaatttgcctcctcacaagaacatttgcctgagatgctgattcattacaaagggacacagagctttgggttcagaaaataaagaatgcttcatatggaaaattttgtaatttattatgtgagcatgcttcaggtttcactttgcttttggtatcatcaaatgttgtagtagtaactgtacgaaatgaaattcattctatttactctaataagcagattcttgaagaaactgctctcataagctaaggttccttatgattctgcaaggaagagaagactaaagcaaatcactgtctgaaaacataacagctggctaaagtaagcattgaacaacactaagcacttcaaaacatcaagtaaaattttggcatttagtatcacataatgtatatgatctatataatataatataatatatacatacataatatctagtatagtgtttgcagttttgtaagtctaatgtattacaagaagcttaagatgtaattataatgatttttatctaaacacaattgctagtgaaataggaagactaattgccaaaatacttatttggtgtattctctcatcagtggttatcaagattttaaaaacttatgagaaatgagttccaagagcttaatccagagtaatacaagtttacttgttttgcttagctttctttatcatcctctttggcttctattccaaatcttcatcatttcctcaacatttaactgccaatgttctcagtaaaccaccttgttaatctgcttttttttcttttttttttttttttttgagatggagtctcgctgtgtcgccaggctgcagtgcagtgacgcgatcttggctaactgcaacctccgccttccgggttcaagcgattctcctgcctcaggctcccaaaaaccaccttgtttcttacttgagaaagttacagtcatccatcaattgtccaccctgcccagcacttactaatatatagacactttcttaactcctttccacatatttggaggatgatgtgtccttctagcacaaagccaagccctctcctggagcccttgattccatttctttcctccccatctccattcctggaatgttgcttcatcagtcattcccactctgttcttatcttccaccttagcccttctgttggctccaatcctgagtccatacaccccaaatctttctcatccttaaaaaatgaacaaacgaaataccccaaaacaacaaaaaataaattctcatgaccacaaaacaaaacaaacacagcaaacagaaagtcagccctttcttgaccacaaattctcttttgtctttcattccatcttttttcttcctttttgtccatgagttgccactgcttttccactcccttttcactccttaactgactgatctctaattttctctcccatcactagactaatacaattcgtgaatgttgccaatgatcattttaactcatcttattggccctacttgccaaatttgggaaaattggtcacagcctcttcttgaaactgtttgatgtttgccgctttctgataatctcttcttggtcttctcctaatctgctcatttcataattttttttttcctgtttgattctcagattttccctcttccccttgtacatcaaaaaattttaaacccaggttctttagtgatccacaggcctcctgaaattctgtgcaaaaatttgggtctttgattatgtgtaattttctaataagaaagtccatagtttacagctattctcaaaagcattaatttctctccaaaagtgtaataaccattgttctatgtggtcttgcaaggcaatcttggcaattaatttagttttttaaacaactgacatatatcaagagcatactaagcaaaagtatagtaattttcttaagtaaccctcaattaggtatgataatcttcactttacaaatcagaaaatggaggcatagagaggtgacttggcctaggagacatagcaggtaggtagctgttatagttttaattgtcttttatttgctgatgattctcaaacctgtatcaccagcccatatcctccaagcttcagattcatgaataactcagtaagtcatttctggggatactctatggggtatcaaactcagcatttttaacactgagcttattaacttcttgccccaacctgtttcttctgtattctccattcagggcccatgctacgggagtcatcttgactgttttcctttgtctcctacattcaaccaattttcagtcctattgaatttaaattcaaattataactgtttctgctaagatactaatcaccttttacctggtcttatgtaacagcgtcctacctatctgaaatcctttgatgacacagcatttcatggtgactgaataaatgggctataaggcctttgaaatataatcccaagcctggctgtctctttacaaccttctccagcctctcccttcccgtaacttatacttcagccacatcgcatgcctggattgatccagggataaaaatctaaactatttgttgggctgggtagactttatctccttgaattatgaattaattatggattctctatgaatattatttcttacgtcttttgataaaagctgggtagtgactgtcaggtattttattatctgaaaaatgccttagagcaattatttggtgttatgattgaagcacatgtattataaagctaatatacttcaaaaagtatgtattttagagatcaattgagcaaagagaaaaaggttaatgtccccttatgaaaattaaggtgcctaagctagactttgtcttgaatagacattggcctacctctgcatggagaaggcctaggagcactatagacagttaatagatttttctcagaatacaattctgggtctgctccaggataggggcagatcaatcaacaaagttccaaaggtctacactgtagaccgtggctttggcaattttagcctggaagattttcaaagcagaattaccccgagaaaaatctcagaaatccatctgagaaatgtctgagtttgaaagcttctcagtgaaccctctagagaaaattacttgtgaaatgtgccccttactaataaaaatgactgacatgctgtttggagttgtttgatataaaccaattaaaccttggagaatatttgccaaaactgtgaatttgtgtttagagatagttgaccttatgcaaactgttttttttgttgttggttacctggtagcaaaattgtgtattgagtccagtactaccatggattttttttttttttcgcaaggggaattctacttgagttatgaagttgagtgtggtttctttcagcttctgatagtctcaatgagattgctgctaattgggtatttgtttacaggttttaacaaactgtaactgttagaatttttccatgcatttatccaaaagaggcagataatttaaataagtactcaggggctacctaatttttcacttactagctatgtaccaaaacatggtgtgttagaggagctctcagtggctcaacatgtatataatgaattgtgcctcgatcacttataaaatggcccctcttgtctatcaataacctcacaccttctttgttgaaatttcaaattccagttttgtgggtacatagtaggtgtatgtacacaaatgttcacagcagcagtattaataatagccaaaaaagtggaaacaacccaaatgtcatcaagcggtgaaaagattaaacaaggtgatatatctataaaattaaaaactagcaataaaaaggaacagattgctgggcacggtagctcatgcctgtaaccccagcactttgggaggctgaggcgggcagatcacctggggtcagaaatttgagaccaggcaggccaacatggcgaaaccccatctctatgaaaaataaaaaaaattagccaggtgtggtggtgggcgcctgaatcccagctacttgggaggctgaggcaggagaattgcttgaacccgagaggcagaagttgcttgagccaagatcgcgccactgcactccagcctgggtgacagagcagcagagcgagactctgtctcaagaaaaaaaaaaaaagaaaagaaaagaaaagaaagaacagattactgatacatgctgcaacatggaggacctcaaaaacattatgattcctgaaagaagccagaattaaaagactacatattgtaaaattccattgtaatgaaatacctagaaaagacaaatttatagagacagaagctctgggcatatgtgggagtaatttactgcaaatagccacaagggaattttgccaggtgatggaaatatcctaaaattgtattgtgggtttgactgcacagttctataaatttactaaaaatcacttacaataggcagattttattatatgtaaattatatatctcaataaagttatttaaaagtgaaaagaatttcaaattctaaatcatgtgctgtagcacgtaggatgctaagagtagatcaatagacattaccatgggaggataagggaaagaggggaaaaaatgcatgttctaaggcgttaaaaaaaataacaaccttccccctttaatttctcttcaaaaattgcaagagtaatgtgaacttagtgcaataagtgaaacagtataaaggaaaataaaggcaaaatgagctattaaaatcttttcacctcatttaccccctgcacttcccatctctgggtccccaaatgacaaatgctaacaatctggtgggaatcctttcacgtatttctacatgttcatgtgcatatgtgtgtgctttggctggtgttattattattttttttccaaatcggatctcaccatatgcacaaggttatagtttactttttgtatttccacaccttcaaaacatcccttcaggtcaattacatgttacctatggagttccttaatattccatgttgccaatgtatcacagataagttgaacaccccttaccaacttccagattgtattcatcaatctgagaaataaaacaagttgtttgttattattatcccttattctgggatattatcccttatgtttgggctgctataacaaactaccatagaataggtggattataaacaatagacatttatttctcacagttctggaggctgggaagcccaagatcaaggtgtcagaaaatttggtatctgatgagggcctgcttcctggttcatatagacaggcatctccttgatgtgttgatgtgtccttacatcatggaaggagtgagggagttctctggggtcccttttataagggcactaatactattgtgcccttttaatttgtgcacataaataaattggcagagcccccgtgacctaatcacctaccaaaggccccaccactagatactcttaataccatcactttggggttaggatttcaacataggaatctttgggggacacaaatattcaatctgtagcatcttgtcagtaaaaaaaaaaaagtaagacagcacctatcctaagaatagagagaaagataggactttatcattgcttttacctttaatgaatgagttaattcaacaaaaattgattggactgctgttttcttcaacatctttttaacataactttgtgtatttatactttactttgattttcaaaaagattgaaaatggcttaggaaaattcatttatataacgtgaagaaaatgggacagagggaaagaaaatcaagaataaaatgaagctggagatagtatcggtgcataagaatgctcagaaagatggactcccaaggcccacatctctgctgggtttgtctatcttagtgcccctgagacccaggaagttcagctcaaatcctatgggtcttgaattcagctcctccactatcagtggagctggacttggacttttttttttttcttatggacaccaagtacttgttataataaatctgggtctgaaatgaggtgtagtgaataacttggaaaggtgaggtggctctgggacctcagctggggtgactcaaatggctggggtgacttggatgactggagctagagttttacttccaagacagcttcttctctcacgtgtccctcctgggctgagatggctgcaggaccagctcagtggggattgtcggtggagtatctgcctgtgcaccctccagcatggtggtctcaggatagtcagaattcttctatctggctcaggcagctccaagggtgaacaaggcagaagctgcatggctttttaatgagctcaccttagaaatcagatggcattttctcctctacaccccacaagcccacccagattctagcacatgggcttcacttcttgaaaggaggaagattaaagaatttgtggccactccataagagtcctcgtgtgaaatatttacctgagaagctcatatttgcattgtatcaaagagtaatactgaaaagctaataggccaataattttgtgtaagagttggtcttttaaaaatggggctgactgtattctgagtctaatcaggcaggatcatactcttagagactgtaaatgtcaacaaactgtcaaagaagaccttgactaaattatggccaattattcagcttgagctatttctcagctcttctgaagatgaaaacttactgggaccaagtagaagtaggtctgggtcacaaagttcagggtcattgccctaaaaataaatctgtgaaaagcaaactcaaggttctcaggtgtctcatgtgatttgaactttcatggtctcactgaacgcattaatactttggattctctgactccaggtctgccttcattagtggttctaacagtgaaactcagtccctgcacaatcatttattatgcctaagggtttttaatggaacaagaaatttatagtaaaaccttgggtaagtggtgggcacagtaacaggtactcaaaatataaggaggaataaggtggctgtcttcaaggaactcacagtctgttgggtgtttcagtcatgtgaacaaataaattgtaatacaagacactacatgtaaaagacccatgggatttcaaagagagacaatctacctgcctggggttcatattggattggcatttttaaccactgtctctctgttcacacctgagccttagagccttctctttcatgtgggctcctaggaagtctctttgatagacttcaaattcagtttctctgtctgcttagactttttagtttactgactgactaggattctgtattcctcttctcctaacattcccccttccaccaaattcctgtctcaactatgttccttgtctctgtgctctaatgactaaagagcaagagataaattcattaaacacatataaactgaacaaggattatgtgctgggaaaaatgtcagctgctggagatacagtggtgagccagttagacgcagttcatgtctgttgcaaggaacatactttatagcaggatgcttccgaggatcttggaattacgtgcttgttcttatcaaatgtgggtggattaaaccttgagaaaattagagaagactttctagccaggtgacatttgatctattttttaaataaaaaaaaaaatagaagttttccaggttgaggtgtaggtagagtggggaagatcagatattttacacagaagatacaacacatgtaaaatataggaaaggcatagctggtgtggggaataaagagagaaattcatttaagagtgtggtgagtcgtgtcagagagctcacctggtgaagcaaagtgggtcatattgagaaaggcctggtatggcccttctgattaaattttcttttgttgttgattttggtttttgagatggagtcttgctctgtctcccaggctggagtgcagtggtgcaatctcagctcactgcaacttccgcctacagggttcaagcaattctcctgcctcagcttcctgagtagctaggattacaggtgtgtgccaccacacccaactaatttttctatttttagtagagacagggtttcaccatgttggccaggatgatcttaaaactcctgacctcaggccgaggcctcccagagttttgggattacaggcgtgagccaccgagccaggccaagtttggacttaatcttgtatgcaagggacagtcagcaaaaatttacaagcaggactgtgacaaaattacattttgctgttctttaagaagaaaacccaggaggatgattgtgacagtggggaaaagacaagtagtaggaggatcagttagcagactcttgaattagcctggatgagaagtaatgagagcctgagcaaagagacggaaagtggggacatatctcagaggttaattctgagatacagttttaagatggaatccagaacatttgtcaacccagtagcctggaagactgaaggaatggtaagatcatgaatctaagatgggaaaagaggaccagattatttgacaataagatgatatcaagttttgttttggatactggaatatccaagagaagataagcagaaggcatttggagactttgatctgaaccttaaaaaggagagaagatatgctggagactcattttttggaggccgtaaaaaaggcaaatggacagaatattaaacaaatacttaagaagtgaggtgaaaaaggccaacagagatgttgaatcagcaaaccaggaggggaaccagcaaagtttcccctcctggaagggaggaaggatcaagtacttgaggaatactgctgtgttgttgatcaaagttcttttagtgcttgggtcaaatgttggcacatgtgatgacagagatagaataagaaccaggtgtcagctctgctgcttgggaagttgtcattgatggctgcaccaaaggtggtaccatatgtggtctcgggccctcctttttggttcttatcagtcaggaatcagaggggagttagaacactccccagattggtcttacttctgagaatgagaggcctctagaaccttggtacattacttatcaaaagttgaaaaacatgaggcataatctttgcatcttggtttagctctaactttaaatcattttttcaatttctgtgcctgaattttatttgcctactgtgtctagttgaatataattttttgttttctgataagccgtactctgttagagatgtttttgagtggatacgttatgtaattttatgctgaaaaacatttcaaatttttctaataacttcctccccaaggaaactaagaattttctctttcctcatcagacataaatatacaagctgacctgaaaaaagattcttgtccaaatgtaatttgtttccacaacatatttattcatttaatttacattgggaggtatattaattataaatacccagttgttcaaaaggagtcatttaatttgcatagtcccttgtgagcagtgtttggtaccaaaggatctgggctcaatttagatgctaagtggcactagggtgtggaggagttaggtaagaatgcttctggctgagtgccctggaaagattaatatccaaatactggatcatctatctggatgaaagcactgattgtagattcaaagagagtagaatggcctggtgacctggaaataataacaggggagaaaagttaccataaaaccaagccaaacaaaatccagtccaacaaaaccagacacatggtctgtcctagagaaggtggtattaaaacagggcttacagcactcaaaaattcacttccaaggtttagtctttgcattccctcattgctaatagcatttttatttttattccttttaagtgttaagatctatgtgatgactccttccttctcttttaaaattaagtgttaatcagcagtgtaattgaagcctttcctgtttggcttataaatgaaagttctcccttgtaagcatttaattaggctttccttcagatcataatctctgttgtgaaatacagtggtaatcatgcgacatctactggcttgtgtctacttaactatctgtgtttaagttgtatttttcttacttgataataagtaccttgagagcaggaaatgctagctttcaaccatctatccatccatctatccatccatgcatccatccatccatccacccatccaccccctcatccattcatttattgaacatttgagtatctatatgtgtcaggcactatgatgagcttagggataaaccagacacagtcttttccctcaaggagctcatagcctagtaagggcagtagttcccaaccagggctgcatataagaatcacctaggcatctgggctccacttctaggcagtctgtttatatggtgctgaagtctgacctgggcattggtatatattttttggaaccatcaaggttattctagtgggcaagaagattgagaatcactgagttaggcagctgggtctacaatacattgtcttataattaaaaaaaaaaaaaaaagaaaatacagtcatatacttttttttttcttttactcctagaacctagtacaaggcacaagttcttattacttattactattaggcttaatcacctacttcaatatcattagatattctgtattataattaaattatagtaattatttcatttgttaattgactttttgtcctaactcaaagagacttttggtgtctattatttttaaagaaataatgaacttagttgttgccatatttagctttatagttttcagattcttgattttatttgatgaaatgtcatttatctttttatggataaaatttttcttgtgacattaaatgcatttaatatgtacgcactcttactttgaaaaattagactttttttctttttaatttctagtttagtcaggtagtttttgttttttttgttttttgttttttgtttttttgagacgcactctcactctgtcaccaggctggagtgcagtggcatgatctcggctcactgcaacctccgcctcccgggttcaagtgattctcctgcctcagcctcccaaatagctgtgattacaggtatgtgccaccacgcccagctaagttttgtatttttagtagagacagggtttcactatgttggccaggatgatctcgatctcttgaccttgtgatctgcctgcctcggcctcccaaagtgctgggattacaggcgtgagccacctcgctctgccaggtagtttataaattaattatgacacaggtaaattatctattctaatgtacattatacatttaaaatggtaactgcaacttccatcaaatggctatgaaattagacaataaacttctgacctagggagaatttgaaagggttactttggcaatatcttggcattgggtttctgttcaatagggaacccgttgttgctcagacacccgatgtggaaatttttcttctccctcagttcaaatgagataaagatcctcctctcctcacagtgaacatgaggtaagagagcacatggggcagattactgagtgcacagatcagcgagcccaactgtagtcatactaagagaagccagttttgggtgaataagtaattagtggcagacactgtggtgtattaaacatagcaatttccttagaaatactattgataaaagagttcttatggtaaaattttggcagtgttggaacaaaaatgtaaaaatctgcaactaagaatttggtatgggaaaataacatcttggcatataccacattttctgggctcccttgcaggtcacagtgtccatgtaactaactcctggttaagaggatatggatagaaggcacatgttcaacttctggcttctgtccttgaaaagtgtgatgattccatcctttgctgtcttccttcccgctgactggaatgtggacttggtagtgagctaccttggactatgtggatgaagacaaagataaaaggaaccaaggactctgatgattctgtagagaagaggaaccgtagctgctcaaacgttcatgtgaaagaagaataaactatcagatttaagccactgctattttgggtctttgtgataaacagtgtttaccatatcctaattcactattccttccatttctaggtcaaccatgttgaattaaatatagtgctctaacttgcaatttggttttatgtctttttatctttacccatgctgttttctgtacccgaactgcactttcaaatacatttttctctatcagccggataaactactcatttttaaaaactcagattattactttctctgggaagtcttcctttgatatttctatatagagaagataatccttttatgcttgcccccactagatctcatagataattacaatgatgactctatatacactttattgagcacctaccacgtgccatgtactttaaatttactttacttacaataggtcatttaatctcgcagtggttttatggggtgtgtatgtgttaaactcactttcttttatttttgtttttaatttttttgagatggggtatcactctgttgctcccactggagtgcagtggcatgatcatagctcacctcactgcagcctcaacctcctgggctcaaacaatcaactcaccctagcctcctgaggctgggactacaggtgctcactaccatatcgcagctgcttgaaaaaaaaatctttttctttttggtagagagggggtctttgttccccaggctggtctcaaactccaggcctcaagctattctcccaccttgacctaccaaaatgccgggattacagatatgagctactgtgctcagccctcagcctaaactcattttatagatgagaaaatgcaggcttggaaaggaagactaggcaattttccccatttcataatgttagaagtccttgaatctgaacacgaattaacctggttccaattccactttctatccactatgcctttatagagttcacttcatttggcatcacatttatttgtttacatgtatatcttgtccaattatacactagattcctcacatctggctcattgagagaactcaatagatataagtttaataactaaactatcattccattttcctcaccagttaccttccaaagttatagtataactccaggtctagcacaataccccaggtgcagagccaagtatcatcgtgcatttcatatttcaggtaatatatctgtattgatttgattctccataacctaggctggcctttgttactgctagacagtacattagttggctagggatgccatagcaaaataccatagactggatgcttcaagaacagaactttatttccttacagtttagaggctggaagttcaagatcaaggcttcagcagagttggtttctggtgaggtctctctccgcagctgataaatggctgtcatctcactgtgtcctcacatgtgcaatcatcccatcatctctagtgtctctttcactcttctaagggtcccagtcctactggattagggcctcactcttatgacctcatttaaccttaattaccaccttaaagccccaaacacagtcatagggcttaggacttcaacctatgaatttggagggacataattcagtccatagcagacagcatactagaagatctggagaaagttggacatattttagtgcacaagtcaaggttccaagagtgagaaagagaggagagtgactgagcacttgggcaacagagccagaagactgtgtttgaaactcagctggctctcaaccagtagtgtgactttgagcaagtcactcaactttatcatcattagtttccttatctatgcaataaagacagtaacacctaacttaaagggattgttgtaaacataatgagtaatataaagcatataaggcagtgtctgaaacacaataatgtccaataaaagccattttgctctcttgaaaaaaatatttattattatttttccattcaaaaagacatgtcttagcttcctgtaatcctatcagctctgtcttggtggtccactctgcagcttcctttggcctcaacaattcctaaacttgacttggtactctggttctatctgctctgtgtgctgctgcatttctctctcatatcttttctgactcaacagaaaagttttcctgaagctgatcctgcctcccatgtcctgggtattgtttgtttgttaaatgatttgcatgaactcaattaaagcagtgctggcgctcccttcaaattgcaccaaacatgctacaacttgctccactttctttaaactccttcttttcatctttgctttcccagttccctcatttctaggcggtcagctcaaatatttgcatatgatctgcctgtcagacatcctcatcaaatacaaacattggcataagccatacgcaaaaatctatctttacattatgattactcctgcctttgctgacaggatggatcacattcaagcacacttatattttgggagagcatttttaccctacatccttaaaaggtagaagaaaatagggaagattttcaaaattattattccttcaaaaagcctttgagctaaaacttattactgtgttaaattagggggaattgcacagaagcttaaaagtgctctgcaaatacctctttttctgccttaaaatttaaaacccaattcctacaaaaaccagttttcctctccaatgtgtttccatgtatactattgcctggatgtgtgatgtggtataagatcagcctatctgatcatcagtatcctaaaccttctaatctttaaaatgaacatatcgataacagtcccacctatctcacactctttttcttagtattaaacaccataatatttaggaaatgctttagtaactgaaagtgctgtatctgaaataatgttcaatcccctactctggtaaatgccaacttatttttgagacttggattaaatatcacctccttggtggagctattattttccttatcataattgttgactggtggatgggtgatatggtttggctctgtgtccccacccaaatctcaccttgaattttgataatccccacatgtcaaaggcacgaccagggggagaaaattgaatcacggggtcagtttcccccatgccgttcttgtgatagtgagtgagttctcatgagatctgatggttttataaggagctttccccttcatttgacactcattctgtctcctaccaccctgtgaagaggtgccttctgccatgattgtaagtttcctgaggcctccccagccatgtggaactgtgagtcaattaaacctcttttctttataaattacccagtcttgggtatttcttcatagcagcaagagaatagactaatacaatgggtgaagtctttactcccccagtggccaggtttatttttttattttatttttattttattattatttttttactggataagattttttcttttattttttctttttaaaatttatttattgtattttaagttctatggtacatgtgcacaacgtgcaggtttgttaacatatgtatacatgaaccatgttggtgtgctgcacccattaactcgtcatttacattagttatatctcctaatgctatccctccccctccccccaccccatgacaggccccagtgtgtgatgttccccttcctgtgtccaagtgttctcatggttcaattcccacctgtgagtgagaacgtgcggtgtttgtttttttgtccttgtgatagtttgctaaaaatgatggtttccagcttcacccatgtccctacaaaggacgtgaactcatccttttttatggctgcatagtgtgtatgtgtcacattttcttaatccagtctatcattgatggacatttgggtcggttccaagtctttgctattgtgaatagtgccacaataaacatatgcgtgcatgtgtctttatagcagcatgatttataatcctttgggtatatatccagtaatgggatggctgggtcatatggtatttctagttctagatccttgaggaatcgccacactgtcttctccagtggccaggtttaatactggtggaatatgaatagaacatagatatttttctgaagtcttgttcatcagcacttgcttctctaactttggagctatgtggtcctgaatatgtctggacacagaacagacttcttgttctttccttccttctcaccttacttttcatcagtgttttatggaaaaagtataagatttggagttagactgatcaacgtttcaatcttcattctgcaactatcaccttactggaccttgggcaccttattttatctctatgagtctcagtgcttcatctgtaaaaagataattgcagcatctgctctgcaggtgattataaggactagcaatgttgactgcctggtgagttgtagttgtttaatgagtggaaatattattgttataattactaatattaatatcatcatcattcttccagtgtgaagggtaagacaagacaatctgcatattgacatggaggtagatctatcccatgatacttcagatacagttgctttgctgatttgggcaactctatctgcatgggtataaagtgaaggagctatgcaagcaaaagaggagggggcagggagggagagagagacagagagagtggaagggaggagagggagaggaggaagtattaactgtgaagacaagtgacatttgtgtgatcttttgttgtttttattactgcatccatctccaaattggagtctatctctaaaacctatggatcttttatattaatttcccagaaagtaaaatgaggctcctataatgtctttcaagtggttttctttcctgtgaggagacagatgccagagcttacacacaggctttctggagctagaggaggaagcaggaggcatgtctggtgaagcacatgggcaaggtatgtacaccaaaaaagtgtgtgtgtgtgtgtgtgtgtgtgtgtattggggtgagggttggttattgtgacctggcccagagtataggacaagccctgaccctgagtctctttgggtcagctcttgtaatagagggcaaaagagccactttctctcaagataggtagactcagatatcgattaactgagggaagccctttgacaaaagctgtggttgaggcaggttattttcttacaaaattattcattttagcttctttttatgtcctaatctacttttcttattttgtcctattctctcatgcttaggtaaaacactattttcatttttttctactaatcatggataattcactttttcaaattatttagttgtaaaagtgtcacaaacttttaatttggcttggctagggggcaaatgaccactttgtggggctagtgtatagtcaggacattgctaaattttggtagagtgaatttgcctctaattcaaaatagaatattttctggagtgctcttgggagccaacatcattgctgagaaataatcttgctagcactttagattttacaatgtaaataattatatttatttattccaggtaaatatctgacttaagctacctcaagagcatctcatattgtcatcgattaggagagtgtgtttttctctttttgctgtttcctgttgaaggccaaagctacactttttacaggaagatgagaatggccataaagtcttccataatctaattctggtctcagtcctcctcactctttcacttcggctccagaaataatgaaccacttataaccccttcttctccctgatgttgttttatgtttccctgtctttggttgtctctatctgcagtctcctccagaaacctcttcctgcctttcctatgccctgtgtatatatagcaaaattggactcattcatttttaaaagtcagctttattaaggcataatacaatgcaatatatatgataaattttaccaatttttaagagtatgtacaattcaatggcttttgacagacttatatagtcatataagcactacaattgtaatctagaacattactctgcaaaaatgttcctatgtcaccttgcagtctatcccctcctcctgcccccggccccaacatctgctgatttgttttctgtcactatagttgtgtctttaaaataatttcatataaattgaattattcattatgtagtcttctacatccagcatactgcacttagcataatgtttctgtattttgtttttgagacagagtctcaatctgttgcccaggctggagtgcagtggcctgatcttggctcatggcaacctctgcctcccaggctcaagtgatcctttcacctcagcctcctgaatagctgggactacaggcatgcaccactaacttggctaattttttgtagagaaatgttctcactatagtgccctgtctggtgtctaactcctggacttaagcaatcctccctcctcagcctcccaatgtgctgggattacaggcatgagccactgtgtccagcgagcataatgtttttgagattcatccatgatgttgcctgtatcagtagttcattcttactgttgtcaggtatgctactgtgtggatgtaccacaatttgctcatccattcaatagttattgggcatatggtgttcacacttccaactttctctagttcctttcctgatatctacctctgccacaaaaagctacataggcttaatcttttcctttgtatctgtagaaatgattctcactgttaataattatttgtctatgaatgtgtttccattaatagactgaaatccttgagagtagaaactgggtttattcatccactttccccaatgcctactgcatagttagggctcaataaagttggctgactagaacaaatataccctttaaagctgacctccagtttagcctaaaacaagatgaaagattaaaattagagccattgcttccttactgtgaatgtggcactagttttatgacccaaacagtgaagaaaaggggaggaaaatgcatgtttatggttgacatctgggaatagcttgaattttccatgaaaaaaatgtattttggcatttgggactgtatgaaatgaattaaccatctctgattggtttcagatttacaagtttctaaggaatttgaaaagggtgtggcagttaagcaatagtggaagctctacatattgaataaactaagaattttgaaggttgcacaagttccgaaaatggtccagcccttttcagtaaacatctaataagtttctcaatagtggaattggtaaaacaaaaagaaaaaaaggaaaaaggaaacacctaacaagaaagaacaaatttatgaaaggataggaaatatttctatcaaaagactttcagtaaatgctattttgttcaaagatgatctgaactgttaatagtgacttcgaagctttatctctccttcccctatcccactgttaggtatagttcattcttttatttgtgtgtgtgctttttttttttccctatggacaatatttatccttatccacatccactgatagatttaaaataggcaatgtagagtggtttgagagactccagggaaatttaattgacaggtagcttacagcaaagtcctgcagtaatgattgggttacaaaatttgcatctgagagggtgttttggcatgaggagggaggagaataaaggaaactgctgagaagtgggaggcatgcagaattttccccagcctatggcctgtcctttgaaacactttatttgaaaaatcttgcttggagaaacaaacacatgcatattcatcactatcaagcacatatatctcaatcaaaaggtgactgaacgttgaatgactatatatatataaaatgactatatatatagtgcatatatatataatgactatatatagtgtatatatataatgactatatacagtgtatatatacgtaatgactatatatagtatatatagtcattcaacgttcagttacctatgtatacatatatagagatatatatgtatgtatatgtatatatgtgtgtatctatgtatacacatatatatgtgtgtgtatatatgtacacacacatatatgtggacacatatatatgtgtgtatatatgtatacacgtacacatatataggtgtgtatatatgtatacacgtacacatatataggtgtgtatatatgtatacacatatataggtgtgtatatatgtatacacatatataggtgtgtatatatgtatacacatatataggtgtgtatatatgtatacacatatataggtgtgtatatatgtatacacatatataggtgtgtatatatgtatacacatatataggtgtgtatatatgtatacacatatataggtgtgtatatatgtatacacatatataggtgtgtatatatgtatacacatatataggtgtgtatatatgtatacacatatataggtgtgtatatatgtatacacatatataggtgtgtatatatgtatacacatatataggtgtgtatatatgtatacacatatataggtgtgtatatatgtatacacatatataggtgtgtatatatatgtacacatatatagagagagatatcagaattttcttttgattttaattttaatttcaatagtttttggggtacaggttcatacctgtacgttcagttacctatgtatacatatatatgtatatatagagatatacacgtatatgtatgtgtatatacaatatgtgcatatgcacatacatacatatatgtgcatatgcacatacatacatatatgtgcatatgcacatacatacatatatgtgtatatgcacatacatacatatatgtgtatatgcacatagatacatatatgtgtatatgcacatagatacatatatgtgtatatgcacatagatacatatatgtgtatatgcacatacatacatatatgtgtatatgcacatacatacatatatgtgtatatgcacatacatacatatatgtgtatatgcacataaacacacatatatgtgtatatgcacataaacacacatatatgtgtatatgcacataaacacacatatatgtgtatatgcacatacatacatatatgtgtatatgcacatacatacatatatgtgtatatgcacatacatacatatatgtgtatatgcacataaacacacatatatgtgtatatgcacataaacacacatatatgtgtatatgcacataaacacacatatatgtgtatatgcacataaacacacatatatgtgtatatgcacatacatacatatatgtgtatatgcacatacatacacatatgtgtatatgcacatacatacacatatgtgtatatgcacatacatacacatatgtgtatatgcacatacatacatatatgtgtatatgcacatacatacatatatgtgtatatgcacatacatacatatatgtgtatatgcacatacatacatatatgtgtatatgcacatacatacatatatgtgtatatgcacatacatacatatatgtgtatatgcacatacatacatgcgtacatatacagatatgtgtttatatatgcacatatacatatatatgtgtttatgtatgcacatatacatatatgtgtttatgtatgcacatatacatatatgtgtttatgtatgcacatatacatatatgtgtttatgtatgcacatatacatatatgtgtttatgtatgcacatatacatatatgtgtttatgtatgcacatatacatatatgtgtttatgtatgcacatatacatatatatgtgcttatgtatgcacatatacatatatatgtgcttatgtgtgtacatatacatatatgtgcttatgtgtgtacatatacatatatgtgtttatacatgtacatatacatatatgtgtgtttatatatacatatgtgtgtctttatatgtgtatgtatacatatatgtgtgtttatgtgtatatatacatatatgtgtgtttatatatgtgtatatatacatgtatgtgtgtttatatatgtgtatatatacatatatgtgtgtttatatatgtgtatatatacatatatgtgtgtttatatatgtgtatatatacatatatgtgtgtttatatatgtgtatatacatatatgtgtttatatacatataatacacatatgtatttatatatgtatacatatgtatacatatatacatagatacacatatatagtatttatatatgtatacatatgtatacatatgtatatacatatgtagggtgttttggcatgaggagggaggagaataaaggaaactgctgagaagtgggaggcatgcagaattttccccagcctatggcctgtcctttgaaacactttatttgaaaaatcttgcttggagaaacaaacacatgcatattcatcagtatcaagcacatatatctcaatcaaaaggtgactgaacgttgaatgactatatatatataaaatgactatatatatgtatttatatatgtatacatatgtatacatatatacatagatacacatatatagtatttatatatgtatacatatatatacacatatatatagagagaaagacatcagaattttcttttaattttaatttttatttcaatagtttttggggtacaggtagtttttggttacatgaataagttctttagtggagatttctgagattttggtgcacctgtcacccaaacagtgtgcactgcacccaatatgtagtctttcatccctcactccattcccacccttcccctccatgtccccaaagtacattatatcagtcttatgcttttgcatcctcatagcttagctcccacttataagtgagaacatatgatatttggttttccattcctgacttacttcacttagaataatggtctccaactccatccaagttgctgcaaaagacattcctttttatggctaggcagtattacatattgtgtgtatattgcatgttctttatccactcattggttgatggatattttgattggtttcctatctttgcagttgcaaattgtgctgctataaaatatgtgtgcatgtgtgaatgactatattttaaattaagaaattgtgtggcctttgtttacattcttttaagcctcaatttcctattctgaaaagtggagacaattataatagctatgtttttttgatcatgcgctacatgttgcatgttcattattttttatctccttaccttataaagcatgaactattttcccatgtaagagaggaagaagtgaggtacaaagaaggtaagtaatatgcctgaagtcataaagagtgagtggctaagccaggattcaaactacaccggttgtacttgacagcctgttcttgttccactgcaccacaggactcatgatgctactctgtcttgtaagcattttaaaaatgttagttcccttgccctttaccccaagtgacaaatgcctgcccatatcagagttatttccagctctaaatcctgtgtgcacgtgtgtgtgcatgtgtggtgcaggaaggagggatgttaaatgcacatgatgatagtaccataatgattaatcatgaaacagatgtttagctgtggatcatttaattttcatcgatgtaagggaaaatagggttccattttttattgtgctgttggcatagatataagggtaggccaaaaaattgggaggttagggaaagatacacacttacattggaatctgtggcaccatgttcagcacacaacaaggcacgccaggagccttctcagtggggttcaagaggaagcagaaagcagaaagtggctgatgtgaaaatccccacaattagggagtccagaataagctgagtgttgcaggacaaggacttaacaggctgctgtgagataaaagtttcatcttgtaggctagagtcttgtggtgtggcaagatttttgatttgacaaaaggacatacttcctaggaagtggtaataaagcaatattcttgagggtcactgggtgacttagcactccagtaatgatgaggttcatctcatctctgaaaggccttcaaccatatctgtctaatccatcagctctgagaatcagtctagctctgatagatctgaggttatgtattgactgatattctctttgaagagaactttcaactacagcttcaaactagaaagaaaaaataatcaacaatcaaagaaaggcaagtcacataatgagccctggttttaggctcttgagtagttacatgtactgcaaatatattccaggaatttatgctatggagtgaattagaagctgaaccttcctagaggagatttcaataaagacaccagcctcctttcttttctttgagcaggagactacatctattctcatgttacagaatggaaaaataatgcatgagctggcaaagatggccagactgacagttgagttttgtgcagcacaaactgtcatacacacttacctgttaatccctagcacatgaatgtgggtcacagccctaaatcttgtcagtggtctttcagccctactaaatcaagggaagaagagtttggtgtaatagctccctctcttccccacattgcaccaccactgcaaaaacaaaaacaaataaagcacactgaacaaaaacgaaatcctacatcagagagttagtgatttaccgtcatggggattagagactacagaggctgcactcacaaaatgatgaatgtctgtatagctgtcactgtgggctgttaccatatattagtctggcccaggcatgctattcaattaaagaaggtactaaatccagggatttggtattgaggatttaattaaggaccataattacttttgggcctttaatatgcctaaaggcagagtgagtgatgcagggccccagccttcacttgcgggcttactgtgacctcttatctgaagagctatcaccaaagaaatctcataaatttctctcaaactcttctcctttcaatccagtaagaaagtgttatgcatgtacttcttgaatagttcttttgaaatttgtatcttagtgtctgcctcaaaactcagttttatgtctgttatctcttgtatcttggattttcagttgcagcttccaattcaatattctggtgtgtgtgtatgtgtgttgtgtgtgtgtgtgtgtgtgtgtgtgtgtgtgtagaaagagagatttattattttgtgttttatgtttacctgtattttcttatttttcagtaataaccgtatgttacttttacaataagaatgcctagacaactgggcagccaacttatgagacagtttgatacattctgatatttcttttagtaaagaatgcatgctaatttgctgatattatttgaggagaaaatataaaatatacatttatcttacaattatctgtttcataactcaattataaaatatggaggttaaaaaagctcaatatgctttaaaataataataaaataataatcaggtaatatttattgagcatctaggatgtgttaaacaatattgattaaatcatttaatgctcacaataatcctaggaagtaaagaaagatttattcccatatttagaggtcaagaaattattattagcttagtgtctaaggtcacagagaggtttgggagtaatggatttctactgaactgtaactgactctagagataaattcctttgcccttccaaacagtactaaatttcactaaattttattggatagctgtgatgataaatgttttgtgtcaacttggctaggtcactgtactcagatacttggtcaaacattattctagatgtttccataaagacatattttagatgagattaacagtttaattagtagactctgacagagtaaagcagattaccctccataatgtgggtgaacctcatccaaaccgttgaagtccataaaagaaaagattactccccttgacccctgtcactgacccctaaagaagtggaaagtcagccagtacattgccttcagacttaaactgcaattccctgggtctccagggaattggcctgccctacagattttggtcttgccagcctccacaactgtgtgagccaattacttaaatctctctctgtttctctcactctctctttgcacatcctgttggttctgtttctttggagaatgctggctaagaggatagcatacacttttgttctcacaaaacttttactagacttcctgaaactgagtaattaatctttctgcttctttgtatcttactgaaattcaggacagaattgcccaacatacaataaaagagaagaagagtaaaaaaagctcaagaaatccaactgaccatttgaatagtcagctcctaaataattgagtcagctggtaaataattttagtagtaggatttttatttttatttttatttttttttttgaggcagagttttgcttttgttgcccaggctggcatgcaatggcacgatctcagctcaccgcaacctccacctcctgggttcaagtgattcttctgcctcagcctcccgagaagctgggattacaggtatgcaccaccacgccggtctaatttttgcatttttagtagagatggggtttctccatgtggatcaggctggtcttgaactcctgacctcaggtaatctgcccccctcggcctcccaaaatgcggggattataggcattagccactgcgcctggcctagtagaaaatttctaaacatgtgagtaaaatacaatgggtcagtagaacttgaatgccaaggtaaggcaaagaattttggtacaggttttatgggttcaaagattttaaaaaatattgaaaactataaattagtagaattttatttgtttgtttgcttggttgcttaatttttgtggttctagtatacattccttttattttcatttgtttatgctgctaacagcctggatccatgtttctgaacaggttaaatgatagtcttccctttgattatgctgtcaatatgatccccttcccagtcagccccagttatatatctggctgctcttctaagttgtgttgttctatgaaattcttccttcagtgttttctgtgacaatcttacttaaaataccataactgttctcattgtcagatctagcaatattggaaaagagttgcaattactatatttgataataaaagatacatgtattaaaggatatccatatttgtagctcaaggagagtcacaattcaacattctgacaactgggtcaatctgttttaataataatcactaaaggaagttgagataaccatacagggagttcttgcttgctcccaaatttcattaagggagttcccaaatcataaatttgcaataaggaaccgaaagtctgtatgacatgaatatatttactaatgaacttctacatacgagattaatctccacttatgcttccttcccctttagcaccactagggatttttgctgactgtcttgtgccttctccatcagctcttcccgatttttggatgtcacaataaaatacaaactaattgcaaagtgaaattctaaatctcacaaaaacatggatttatgcagtcactgaacacaatgttgaacttctcaactctttattgcaaaaagtacattaggcataattaaaccagttaacaatagaagacaatgaaaatctacccagatgatggagtacacagtacttcaagagattgacttgtggctgggcgcagtggctcacgcctgtaactccagcactttgggaggccgagacgggctgatcacctgaggtcagcagttcgagactagtctggccaacatggtgaaaccttgtctgtactaaaaatacaaaaattagccgggatcagtggtgtgcacctgtaatcccagctaattgggaggctgaggcaggagaatcgcttgaagccggtaggaggaggttgcagtgatccgagatggtgccattgcactccagcctgggcaatagagtgagactctgtcccacaaaaaacaaaacaaaacaaaacaaaacaaaacaaaacaaaaacagagagagagagattgatttgaatatcaaagtattaagatatgtactaaggaaaactaatgaagcactcatatatatttttgcaaaaatggcaagatttacataatactgcacaaatcaaataggaaggttatcatattgtgatctcttggaattttgttcgaaaaaatgctaccaagaaatactggaaatgcaaataatacttggttcatttttttcatcactgtaagtgcaatgagctatccattgagccacagagctacctacttggttaattctttacccttttctcttttgtttggccacagatagagaaggttgagttaataaataatactttttggttcaatggcataccatcctcattattctattaggttcttttctttttttttttctttttccttccttccttccttcctttcttcatccattttaaccgcattccataattttgttcagcttcttcccataggagctctattaatatatttagcatgtatcctactgttgtcatcctttgacctttggctcttgacttagaccccatgttagagggttctgaatattacaaaaacaagaatgtattatagaatacctgggaaactctatcactcaccttccagtgttcatggctggcacaacataatttgtagccctcaatattcactcttctgactcttcattgagtccccaggaaagtacttctcggtatctctcgctcgtatcctctcagttcaaatgcactgaaaggcggtgcgtgtgctgttggcagcattagggcagataacgtctgaagtacagggaggatttgaacagtggaaacacaggtaagagaaaagacaaattaccttgttaaatctttgctctgagatagtatgaatgttatagactgtggctaaatgaagtattatttccagtggtgaatatttccttgatttctcttcaaattgtggcttagatttgtgaattagcatgttgtttacaacagctgcacatggtagctcagaaatagtttgtaatattaaataattactcagccaaacattgttggcccattgacagaacatccagatgtgtgcgataatgattaagtccagtctaatctctaatattttgccaacttttcatcatacatatataaacatatctttatgtatgttttccaattttatcattaggaagatattttgtgaaataaaaagataaaatattgcatttaataatctttcagcttgatttatcacttttaaatctatagatacatgtgaacctccatttacattctttggctcaggccctgcaatagttatgtatggacttgatccatttatttgtttgttttaaaaaatgtgattatcctatagactctatctcattcatcctttatttttttaaagctcagcttcttgatgtaagctctacccctgtaactgtgtgtagaaacagcatgatccttctaaatatcatggaatattttttactgggcatctatcacattgtacttacctgttcacctggtggaagacagtgagattgtcttcaattttttaaaatggcaatactgtgacgagcattcttgtatatgttccctatgtacttgtatgattgtgcaatttctctccagaaaggcagcacaagtttgcactactgccagccgagcatgggggtgcttatattactacatccgtgtcaaaatatggcggtaacctgcttgctaatttttgacaattcttggtaaagtgacaatccttgttttaaatttaatttctctaactaccaatgagtttggtttcttttgttcataactaaactgtgtctttttgtttttaaagaattcatgtgtattttagatattagatccttatcaattttacaaattgcacatacttctttcaatctgctatttatttgcttactttatttacaatgtcacttactggaaagacatatttatttttcatccaatcaaattcatcaaattttaccttataatttgtactattgggatttttgtctaagaattacaaatattgtcctactccagctctctaaaatatgtcgttttatctttcagtcctgggtcttcaatgcatctgtgatcccatgtttatgtggtgttaggccttttgtccatatagtgacttagttttccattgatattgactgcagcagtctttattatcctcattgatttgtgcctttttcatcaagtagtaaattttcatgtatgcaatgatcttctgagttgtctactctgatacattgttctactttctattcctgcactattatagtgtgttttcttacactattacatattttagtatccagaaagaaagttctccttgctcttttttttttaagttgttttagctatttatgggcatttattcttctgtatcaattttaggattatttcatcacgttcctaataagatctcactagaatttctattggcatcatttcaaaattgtagattaatttgctgagcattgataactttataaaattaagttgccccattcaagaacatgagatatcactttaattattcatttaaaatgtcttctcatagagtcttaagtttctccacaagggaaataattcttcacctcaaattgctattttctctctttctgaaagtcttattttcaagatgttggcatttatacttctattctttatatcccttagttttgttttgtcttatttttttaaattttcagtcccatcgcccttttctgatactttctggaggagttccttcaacttttcttccagattattgatttattaattagtagtatatcctatttacccaatttattgttttagttcaattataatatttcttcaacttttaggacatctttatcccggttcatattacttataccctctgtatttcgttgaggatatttactgttctgacttcaaattcttcatgtggtatattattttccatttgatttttttctttcatactggttgtactcctcaggtgatcagttatgtcagcagcttgctaaatttccttggggatattatataatatgtattgggaagaattctaaagtgaggaagttcacaaatggataaataattccagtgaagataaatggtatgtggaacacaaatcaggcaaaagtgacagcatgaatgtggggacatttgtgtgttagtcttgattagttgataagggaaggcctctgaggaggttacaggtgagccaagagggaaccaaaagagagcagtaatgagaagatctgggagaaggagcatcccaggtagaagcaacacctatgtaggcattttgaggagaaacaaacttggttatacttgaaggacacacagaaagccaaggtcattgggaaagaatgacaaagtagcagagtgatatggaatgagagtaaagagatagatagggcccagttacataggtccttacaggcagaaggagttcctgttttgtttttctgaatgaaatgggaagtgtccgtaggtttctaaatatggaaggatatgatctcatttgctcctcctgcccaacatttttattacagtaattttaagcatacaacaaagtggaaagaatttttacagtgaacacttgtatgctcaccaatgttactgttaatattttacaaaacctgtcttatcacatatctattcatttgttaattcctctaactatccattaatcggtcagattgattgacctatttcaaaataatatacagactccagtatatttactcctaaatacttcagtatgtagatcattacctagagttttgggttctttctttttttgacagggtctcactctgtcgcccaggctggagtgcagtggtgcaatctcagctcactgcagcctcaacctcctgagttcgggcgatcttcccacctcagcctcctgagtagctgggatcacaagcacgcaccaccatgcccagctaatgtttgtattttttgtagacagttttgccatgttgcccaggctggtctcaattcctgggctcaagcgattctcacaccttggccttccaaagtgctgggattacaggtgtgagccaccacacctggcctgtgttctttcattttgattaaaaatttacataaaatgaaatgcttaaattgctgacttttgacaaatatttccacctctgcaactcaaacttccataaaaatacagtccattaccttcaccttaggaagtttccttgtgaccattgccagtcaatctctgtactcactgcctcagaggcaaccagtatactgattgtttttcatcattggttagtgcagcttgttgtagaatttcatataaatatattaatatggtatgtactttattgataaagtgttttgcagtcaacataatattttaaaaattcatccatgttgttgcatgtatcagtactttattactttttattgtggagtactattattattatataaatataccacagtttatgtattctattgacatttgggctgtctgtagtttatgaataaagctgtgctcaacattcttgtacaaatctttgtgtaagtgtatactattttttctcttgggtaaatatctgggagtgaaattgacgggtcattgaatatgtttcattttgtgagaaattaggaagtcttttcctaaagtgctcatagtgttttcatttgttttttaaaaacaatcattttggttgcaaggagacaagaatagaagctaggaagtcagggtattgtcaaaatctgtagccagaaactatatatagcttttagccagaatttctgtaaaatatttgtataataatattagttgccagcaaagctgatatgtgactgagaatgagataactaatcacagagccaatttcaggtgtatactttgggggtatgaaaggaattaaaaacccaagttctacttacaacccctcatttaggagaaaggtatcacacagtaaattacatggagaaaacactgctctgagcctctgtggtgttttccacgtgagtgatgagacagagtctcgctttgttgccaggctggagtacagtgatgtgatcttggcccactgcaacctctgactccctggtttaagcaattctcctgcctcagcctcccaagtagctgggattacaggtatgcgccaccatgcccagctaatttttgtatttttagtagagatggggtttcactatattggccaggatggtctcgatctcctgacctcttgatcctcccaccttggcctcccaaagtgctggcattacaggtgtgagctatcacgcctcgccaggattttgttttaaattacaggtttattagtcagggttctctagagggacagaactaatggaagatatatacacataaagggaagtttactaagtattaactcacatgatcacaaggtcccacaataggtcatctgcaggctgaggagcaaagagagacagtcctagttgcaaaactgaagaacttagagttcgatgtttgagggcagaaagcatccagcaaaggaggaagacttaggccgggaggctaagccagtttagtcttctacctgcttgtattctagccacgctggcagctgattagattgtgcccacccagattgagggtgggtctgcctttcccagcccactgactcaaatgttaatctcctttggcagcaccctcaaagacacacccgggatcaatactttgcatccaatcaagttgacacttagtattaaccatcacaagtccaccccttgtcaacttgaacccatacacatctcctgagaccatacataatcttcaaataaaaacgaaaataagttcattattacacctaatataatacaactatccttcgtacaactggaaacgcaccaatcctcaacccaaatactattatataaagttaaccatacttaaatgctgatgtgaagtcaataaatcttatgtcacatgataaaggagaaagtaataaaatgaagatattttcttagtacaagtgtatacatgcacaaacatgcttttaacaaaagaaggaggaaataggagatacataaaacaattactgtccttgtttctgcaactggtcatgtgtttgtagctggtattgattactaccttcttctactaccccattatgtattcactttgccttcagcaagcacctcagcaggtcatggttttttttttcctggtggagtgacccagactttcattcctgaagagtctgggtcatttgtggtcctgcctggattgggctgttgtagtttcccattgaccttaatcacagagcatgataatactaagagatgccctaatggatttcctgtattcaatgcatactcttcctgacttctgtgtggagtagtagactgatttcatcttgatagtccaggtcaatcaccccagccaacactgcaactcccttcttagcctgttgacttaaaggtaggaggagcccaaagtgtcgaggtggcaatcttaacttccagtttaatgggatcgttgttgtgtctccctgtggcagcattcctgcctctggaaataagacctctgggctagcagaacataatgtcgtgagaacaggaagcaaaaatgttgctagtggatcactatgggtgttggtgagtggtgccacttccacttccaccccttgaatcctggacccgtgaatcctggctatgggagaaacagtaccatatattggatgctgatttagagcacacgtgaccttctggagaactttgccccagccctgtgaagtattgtaacttagttggtgttgtaattgtggcttcaacaggccattccactgttctattaatctggctgcttcaggatgatggagaacatggtaagaccagcgaattccatgagcatgaagccactgccacatttctttagcggtaaagtgagtgccttgatcagaggcaatgctgtgtggaatatcatcacagtggataaggcattctgtgagtccacagatggtagtcttggcagaagcattgcatgcaggataggcaaacccatatccagagtaagtgtctattccagtgaggacaaacctctgtcctttccatgatggaagaagtcgagtataatcaacctgccaccaggtagctggctgatcacccccaggaatggtgccatattgagggctcagtgttggtctctgctgctggaaaattgagcacacatcagtggccgtagccaggtcagccttggtgagtagaagtccatgttactgagcccattcataacctccatccctaccaccatggccactttgttcatgggcctattgggtgacagcacgggtggctggggaaagaagctgagtggtgtccacagaatgggtcatcctattcacttgattattaaaatcctcctctgctgaggtcacctgttgatgagcactcacattggatacaaatatcttgcttttgaccacttagagaggtgcatccacatacgtcttccccgaatttctttgtcaccaattttccaatcatgcttcttccaagtcactgaccacccagccaaaccattggctacagcccatgaatcagtatataatcacgtatccggccatttttccttccaaacaaagtgcacaaccaggcacactgctcaaagttctgcccactgggaagatttcccttcaccgctgtccttcagggatgtcctagaaaggggctgtagtgctgcagctatccactttcaagtggtgcctgcatatcgtgcagaaccatctatgaaccaggccctggtcttctcttcctctgtcaactggtcatagggaactccccatgaggccattggtccaggctaggggagagaaggcagggtggcaggagtggacaccatgggcatttgagccacttcctcatgtaacttacttgtgccttcaggacctgctcgagcccgatgacgtatataccacttccatttgatgatggaatgctgctatgcaccacctactttatggctagatgggtcagaaagcacccagttcatgataggcagttcaggttacatggtgacttacatagtacatatatatatgtaaagaggggttctttaattattaactcacatgatcacaaggtcccacagtaggccatctgcaggctgaagagcaaggagagccagtatgagttccaaaactgaagaacctggagtttgatgtttgagggcaggaagcatccagcacgggagaaacatgtaggctgggaggctaggctagtctctcttttcacatttttctgcctgcttatattatagccatgctggcagctgattagattgtgcccacccaggttaagggtgggtctgcctttcccagcccactgactcaaatgttaatctcctttggcagcaccctcacagacacagccaggatcaatactttgtatccaatcaagttgatactcagtatcaaccatcatgcaaggcttatatatttttcttttttattgtgaaataaaatacatatcgagaaaaaccacacaaaataattgtctggctttgaattattgaagttaaacactttcaacttccacccaggccaaaatatagttttgccagccattctagtagcttctccaggtgacctttcccaatcacacctgtccttcttttgaaaattaaccatgtaacttctatccaagtttttttttttttttggcagggtctcactctgttgcccaggctggagtgcagtggtgcaatcacggctcactgcatcctcaacctccagggctcaagcgaccctcccacctcagccccccgagtaactgagactacaggtgtgtgccaccacacctggctaactttttctttttttgtagagatgctggtcttactatgttgctcaagctgggttgcttccttctttatggtttcatcacttgtgtgcattattagacactctaattgtttttgtctatttaaaaaatttgtatgtcttttaatctatggacttatcctccatttcattctttgccttatagtttatctgttgaaaaacttagggcatttaacacaaagtgtcctgcagtctgaatttttgttttttgttttgaatcctcatagtgaagctcaacatgctcttttgtcttctgtatttcctgaaaattggcagctaaatccagggacttgatcagactcaagtttgattttattgacctataattcctggctgtttgtctttttctgatgttagaagacattgacgctccttgcctcaattcgttaaatcattgcagattgcaaaagggtgatgttctatttccatcatttggttttcaattattagttgaaataccttgcataaagagatgctgctttcatcttctatttgtttggatagtggcacagtttatataagaaaggcaaaataaatgtctgattctagccctttacctgtttttaagataatacattggttctatatcatcctctgaagctaagcaattaattttatatacatagtttttgaaaaaagagagggaaggagtttgaaaaaatattggaaaagctcttttacatgaaatgctaacaattgtaccagcattctaaaggaatggcttctttgtcaagttatactgtgtgtatccctctgtgtttgtgtgtgtgcatatgccaaaggagaaacacactgtcattataaaaaacattgataagtaattgttctttggctaatataacttagcactcctcattttccacacagtaaattttctgtaaaacaagacaaattactgctgtttgtctgtactatgacataatgcactatattaaatcatctttatggaagtttctatccttacatttatgtgagaaactttatgtagccatttacttgctttacaaattcttcagcagtataataaatcagagttacctaattaagtgttaatatgtaaggatataaagttggccagactcacataatctcactttatttatttctttcaggaagtagaataacatcccctctaacaaataaaaagtaataacacactcctatgaaaaggctgtcctttggtggccagacattttggaacgtggaattacagctctaatctgggcaaagctgctgtggcttctgttccaggctggctgactctgttgtacctagcatagcactgttccacttctttaaagggggccacacataggaatctttgtttcctctctggcggtgatcaagtaaatggagtgtattttttcaggcctcagatagaatcagccacataactaagcctgaaaaaatcttgttcccagggccttgtcagctaaaatcctctcagactagctgatagggtgtgtagagatttaaaataatagctccacatgccctttgcaataataatgaacaggtattagaaaatctgttacggtaccctagcccagttttcaactctgtttcgcaaacactctcttggtctggtagctacttgcataattgctggcatttcaggtaaaggaattttaaaacatttttcaaattccacactgttttccatcttaaaaaaaaacaaaaaacaaaaaactagggctattcttagcaacattagaaagcactttctgtaaataatctatgaattgtatatcaaagttcaacactgaaatgatttgccacttgagagctgaaaggattcttgcctctatttttggctttgttttgattatatgttatttatttcctaaatgatgccacccacttaatggaggtaaggtataaacatgtgaaatgaagaaagcacatttgccatttaatgtggaagcataatgttgttattatgaacccatggccctatacacgattgattaggagttgagctgatcctagcaagtttctaacactggtggcctgaatcgattgatttgtttattgctgaagctgccattagaagtaggttgattggttcaatttaaccagtgagcaatctttcctacccgtgcccattttgcgctacctgagcagattcagaggtgaataaaacatgcctctgtccttgaagaatatatagtctaaaacagtgatactcaaagtgtgggccatggacccatgctgacctacaaactgtttcttacccagtccataatgaaataagcacggcaattgagagtaaacttttaggaactctcatagcaatttaacagagtaattttaagtgtgtttattttgttctgctagtaatttcttcctattgtagttttaaaagtattggtccaaaactgagaggaaattgaaaaaaaaattggttctaaaccactgatagtttgatagcactggttgcaagcataagtcaagtgtgttcacagataactacaggtggtttgatctactgtaagtagtttgatctttctttttcattatttttgaattaagatacaattcccataccataaaacctgcccctttaaataaaatgtacaattcagtagtttttagtatattcacaaggttgtgtactcctcaccattatctaatttcagaacatttttatcattgaaaaaccccaaacctataagcagtcactccccatgcccccattcccccaagcccttggcaaaaacactaatctaccttttgtccttgtaatagagatctgcctcttctagtcatttgctataaatagaatcctacaatatgtggccttttgtgtctgacttttttcacctaacataatgttttcaagattcatccaagttttggcaagcatcagtaatttatccctttttatggctgaatgatattctaatttattatttatctaatgatattgcttatccagacatccgttggtgaacattttggttatttccactttttggctattgtgaataatgctgctctgagcatttctgtacaatttttctgtgaatgtacattttcaatttgggggttatatatacaggagtggaattgctgggtcatatggtaactctgtgtttaactttttgaggaagtgacaaactgtttccaagtggctatactattttgcatttcaacagcaatgtgtgaggttttcaatttcttcacctttgccgacacatcttgttcctcctttcattatagccatcctagtggctgtgaagtaatatttcactgtggtttttattcccccaatgactaacactaatgactaacaatcttgaatgacttttcatgtacttattgttcatttgtatgtcttctttggataaatgtctattcaagctctttgttcgtttttaaattgtttttttttttaaattgttgaatcatacaacttctgtatatattctggatactagagctttactgaatacatgatttgcaaatatctttttgtatctgtgagctgtcttttcattttctgaaaagtatcctttaaggtaaaaatgtttttaattttgatgaagtcaaatgtatatacacttttctttcttatgctttaggtgttaaatctaagaaaccattgtctaatccaaggtcatgaagatttataccgatgttatgttctaagagttttataatcctagctggatatttaggcctttgatctcttttgagttaatttttgtatgtggtgttagttaggggtccaaattcattcttttcatgtggatatctggttgtcacaggaccatttgttgaaaaagactattctttctccactcaatagtcttggcacccttgtggaaaattagttacctcattaatgaatgtatgagtttgtgtttgaactctcaagtctatttcattaatctgtatgtctatctttatgccaagttttgaaatctgggaatataagtcaaacaagtttgatcctcattttttattattttttggctattctatattccttaaatttttatatgaattatgatataagcttgtcaatttgttcaaaaaaaaagccagctgagattttgataaggatttcattgaatttctagataatttgtagagtatcaccatttaaaaaaattaagtcttctgaccggtgatgataaaatgtttctccatttaattaggccttttaaaatttgtttcaatggtgttttgtagtgtttagtacaaagtgttgcaactctttaatttatttctaagtattttattccttttagtgttattttaaatggaattattttcttaattttatattcagattattcattcctagtgtacagaaatataattgagttttgtatattgatcttgtgtcctgttacctcactgaactaatttattagctctaatagtttgtgtgtgtgtgtatatgtgtgtattccttaggattttctatatacaagatcatgtcatttgtaaatagagttagttttacttcttttcagtttggatgtctttaatttctttttcttgtttaattgccgtggctagaaccttcagtataatgctgaatagaagttatgaaaggagacatccttttctttttactgatcttactgatgactcttctgttttaatcaaagatttataaaatgtgggctatatcttcactgtgttttcaacccagtctttcctgttggaggggggtcactgttatcatttctcaggctgtccattatcttaacactttaggaatataaagaataactattcgttttgttaaaatataagtaagcccagacaagggtaataaacattataatacctatatacataataattttttacaaatccaaatgataatccacacaatgttagactaaagagctagttttcttgtaatttatcattaactgtaagctttgttatggttactttaatgaaccattgtgaatgtaagtaaattacagggcatatttcagaggtgaggtggcaaggagggaacaggcaacttttggttgttcagaatctacttactcagcaagtggaatttagaattacaggatttcaaggttgaaatggtaaattcaaaaagttcaatcattatctgatgtttgaattcccccatagatatcttttctaagtatttatgtaacttgtgagtcaatctctctagtgagaagaaactatcataaaggtcacccattacacctcaattcagagtatttattgttttaatgacttaaattatttttcacattaaaacttcctgcagagagggttgaagaaagaaaaatgagtattattattattagtagtagtagtacagttggttaaaaagttaaaattaattgctcagaagtgatttaaggataataactattagtttagaaaacgaaataagatggaaaataaaaaataagcacaatagtatgtatttttaaaattaatggccaatttttcaactattgggtcacagtgaccttagcatcatgtgtacagtaggaaaaatcaatcaaaacatttttatggaggacctttgctctaagtgcaacaagctagaaaaacttaagatatattttcttttaaggaacttaaaatctccttggaaaggtaagataagaatgtagaaagtaacagaaaatatgagtacaccaataatgtgcaccagtgaaaaggttaaaaataataagatttaaggctttctcagaagtatggggtggtcagtgaatgcattcactgggggatgaaggacatgggaagggggctgagacttgaaggattcagggactgataagatgccgtgaagatgaggcaagggagccatttcaagctaaagagtgggaggaggatggtttgagcagagatctggtgcagaaaagagaagaatgcctggaggcaagttgggtaactgcaggagataaggtttggcaaggtaaaaatgggccagatggttgagggctaggcacaggaattcagatttttgtcttgcacagatttcagagtttgaattaggaaataatttgacttagagactgtaaacacccagaaaaatgtaagagacagcagttatgtaggctttgtgattattgtagaacttcagaacggaaatgaataatctgacctatgtggacagtgatggggatggaaaagcagggatgcatgttagtgaagttgcacaagaggaatcaaaagcatttggtaacatgatctaggggtgaggggcaggtaactttcaaactttttgatgatgatcataacaagaaatgcatttatatattttgcttataattacatatacatatatatgttgtacatttataaaaaacggaaatgaaaattctaaaaaaaagtttacgcttactctaattgatgtacattgatatttgtttccttccattctattaaaaaataaactgatattaatccatgaaaatgattttatgaaccatgagtgagttgttatttgaacacaatgtttgtaggggtataatttaaaggataccagaaaattgtccttctccaagatttcttactgattttgcatttccagaattggaaattgaaattttggtcctgtgttaaagcaaatctctttggaaaggcataaactttgcaaccttttaccttacagtgagcaatttattatctttcctggaaatcatgttacgttagagcagacaatagggaaaatatggaagcctgagatgtttgtctgaaaggttgcgaaaggcaagacggtgttgagacagaaatgttgtcctctttaaaattttatatagaagttactacaataagtacaagacaaaattaatattcactcattcattctcacttaatcacaagataaaattaatattcactcattcattctcacttaatcttagccaaaaaactgagaagcaataatattcattctctgaatgaggaagaaagacttgaaggaaggtggaacaaggattggcaaacaggatagtaagccattgtttctcagccatgaggagaagatgctaaccagtacatctggaaggtgaagaacaggagaaggagaggtttggaataaccaggaataggaatagagggagaaggtgggagtgtaactgtctcaggagagcgttatatgtcaatgtatcatgtcaatgagccatgataaaagtgactctagtcctcaggtttaggcaagttgcttagtctgggtcctctatcttttgttgtgaagactcgatttcactagagtaactgtccaaacaaaccaacacacagagaattaggaaaatgggttcctaattcatctgtggtattgtcaggagaataggagagtcaggcagttagtgttcttctagtggttccaaggattagaggaaaatcatattggagaaagggcatagggcacatgccttaatttatgtgtatggagaaggatgctctctggatggctgtgataatcccaggtatctcacgttttcagcttcaatttggtgtgtggtctgcatctccatgattttgtctgggctgaggggtcagtcgtgaacacttcagggttattttgcaccaggccgcttagtcctatctagaatatggcaaatcactcttagatctaagatatcaatttagcagaaacagcagtcagtgagtgaagtcaaataatttcaatggtgcacaatggatgtattaaattttatcatagcactaacctcttctatcaattgtgtaagattacttttctcttgaaagaccagtacccttagaagaaagatcaatcttctcttattaatgcctctcttaaacagaggcattaaacttacatatttgcaacttctgcttaacatttataattaagaattcctccttaatttggagtaaattatatagaactagaataaaagatgagttccctttgccaatttatagagcaggagctggataaaaggatgcggccatgctgttttcttctcagagctacatctgctccagtgcctgaggagatgcccaaggcacagttcaaagtctctatttctaatctctagtgagagtttgataggaagaatgtggacttatccttccttgtcctgaaattgagaggaagagagggatgtgtgtgactcccctccccgtgttcagggactttgccatcaaagccttgcattattccaggagtccccacttgctttagttcgatggaaagagaatttagctggatggaggaatcaggaattccccctgaatattgtgtgccaaggaaatcttttttgtttccagtaatcataaaataacccataacacccagatgggtctgattcctggacctcaacacaaatgtcccctcattctctactctctttcagatataaaggtaaatgctatctaagccacagtaaccttgagatactgtgggcctggggcagagaagagcatctgtagaagaggcagtggaccacagtactggatctggaagttctgagcctttacttgttgaggagcagtgagtacctatttgggatttctggtgagtaacatcacctgcctcctctgacagaactccattatcatgtcattgatttctcagtgaaccatactctaaaggtattactaggagaatctggtctgtgaacatatgctcatagttctgtgtcataggaacaggtataagaatttcaaggaaataagcatatcaaatggtcactgtggaagactaattcgctgtctacattgagttagcatttgcacatttcacatgactccacacccatgataaatgatgaagaacaacaataggaagcatgcaaccagccaactgctctgagggcccagaagggctgactttgggaaactgactctccatcctttggaaaacaaggctgaagggtcctgactttttcagcacagccctctccatgcaaactgtcatgaggcaaaacactgggtcatagacctgtgattcccagccagtgtgatataggtgtcagatgatatgttcataagaacatggtaaaatgagaaaaatcacaaaatggagtaagtttgtaaataggtccaagattattacagttaaaggaattttccttattttaagattatactcggggatgtggcaagatgaccaaataggaacagctgtagtctgcagctcctagtgagaccaacacagaaggggggtgatttctgcatttccaactgaagtacccagttcatctcactgggactggttaggcagtgggtacagcccaaggagggtgagcagaagcagggtgtggcatcacctcacccaggaagtgcaaagtgctggggacctccctcccctacccaagggaagctgtgagggactgtgctatccagcctggatactaagcttttcccatggtttttgcaatccgcagatcaggagactccctcgtgtgcctacaccaccagggacctgggtttcaatcacaaaactggggtggctgtttgggaagacactgagctaactgcaggagtgtttttcataccccagtggtgcctggaaccccagcgagacagaactgttcactctcctggaaaggaagctgaagccagggagccaagtggtctagcttagtgggtcccactctcacagagcccagaaagctaagaagcactggcttgaaattctcactgcaagcacagcagtctgaagtcgatctgggacaatcaagcttggtggggagaggggtgtctgccattactaaggcttgagtaggcaatttttccctgacagtgctaaggaggccaggaagtttggactgggtggaattcaccacagcacggcaaagtgactatggccagactttctctctagattcttcctcacagggcagaacatgcctgaaagaaaggcagcaaccccagtcaggggcttatagataaaactcccatctacctgggacagagcacctgggggaaggggagactgtgggcgcagcttcagcggacttaaaggttcttgcttgccagctccaaagacagcagtggatcctgacaaggaaagatctcctagcacagtgctcaagctctgctgaaggacagagtgcctcctcaagtgggtccctgatcccctgtgcctcctgactgggagatacctcccaacaggggttgacagacacctcatataggagagctctgactggcatcaggccagtgcccctctgggataaagcttctagaggaaggagcaagcagcaatctttgctattctacagccttcactggtgatacccaggcaaacagggtctggagtggactgccagcaaactacagcagacctgcagaagaggggcctgacttttagaaggaaaactaacaaacagaaagcaacaacatcaacatcaacaaaaaggacccccacacaaaaaccccatccaaaaatcagcttcaaagatcaaaggtagataaatccaagaagatgaggaaaaactaatgcaaaaatgctgaaaaatccaaaaaccaaaatgcctcttctccaccaaatgatcacaactcttctccagcaagggcacaaaactagacggagacggtgattgatgaattgacagaagtagacttcagaaggtgggtaaaaacaaactcctctgagctaaagagcatgatctaacccaatgcaaggaagctaagaaccttgataacaggttacaggaattgctaactagaataaccagtttagagaagaacataaatgacctgatggagctgaaaaacacagcacaagaacttcatgaagcatacacaagtatcactagccaaattgatcaagtggaagaaaggatatcagactgtagatcaacttagtgagatgaggggtaaagacaagattagagaaaaaagaatgaaaaggaacaaacaaagtctccaagaaatatgggactatgtgaaaagacgaaacctacgtttgattggtgtacctgaaagtgacggggagaatggaaccaagttggaaaacacacttcaggatattatccaggagaacttccccaacctagcaagacaggccaacattcaaattcaggaaatacagagaacacaacaaagatactcatcgagaagagcaaccccaagacacataatcttcagattctctaggttgaaatgaaggaaaaatgttaagggcagccagagagaaaagtcaggttacctacaaagggaagcccatcagactaacagcgaatctctctgcagaaaccctacaagacagaagagagtgggggccaatattcaacattcttaaagaaaagaattttcaacccagaatttcatatccagccaaactaagcttcataagcaaaggaaaaaatattttacagacaagcaaatgctaagggattttgtcaccaccaggcctgccttacgagagctcctgaaggaagcagtaaatatggaaaggaaaaaccggtaccagccactgcaaaaacacaccaaaatataaagatcaatgacactatgaagaaactgcttcaactaatgtgcaaaataaccagctagcatcatgatgacaggatcacattcacacataacaacattaacgataaatgtaaaggggctacatgccccaattagaagatacaggttggaaattggataaagagtcaagacccatcagtgtgctatattcaggagacccatctcacatgcaaagacacacttaggctcaaaataaaggcatggagaaatatttaccaagcaaatggaaagcaaaaaaaaaaaagcaggggttgcaatcctagtctctgataaaacagactttaaagcaacaaagatcaaaaaagacaaagaagagcattaaataatggaaagggatcaatgcaatgagaagagctaactatcctgaatatacatgcacccaatgcaggagcacccagattcattaaacaagttcttaatgacctacaaagagacttgggcttccacaaaataatagtgggatactttaacatcacactgtcaatatgagacagatcaatgagacagaaaattaacaaggatattgaactcagctctgcaccaagcagacctaatagacatctacagaactctccacctcaaatcaacagaatatacatttttctcagcatcacatagtacttattctaaaatcaactgtgtaattggaagtaaaacactcctcagcaaatgcaaaagaaaggaaattggccaggcacagtggctcacaccggtaatcccagcactttaggaggctgaggtgggcagatcatgaggtcaggagtttgagaccagcctggccaacatggtgaaactctgcctctactaaaaatacaaaaattagccaggcatggtgacgcatgcctgtaatcccagctacttgggaggctgaggcaggagaatcgtttgaacccaagaagcaggggtttcagtgagccaagatctcaccactgcactccagcctgggcaaaggagcaagactccagctgaaaaaaaaagaaaagaaaagaaaagaaaaaagaacggaaatcataccagtctctcaggccacagtgcaatcaagttagaactcaggattatgaaagtcactcaaaaccatgtaactacatggaaattgaacaacctgctcctgaatgactactgggtaaataagaaattaaggcataaataaagaagttatttgaaaccaacaagaacaaagagacaacatgccagaatctctgtgacatagctaaagcaatgttaagagggaaatttatagcactaaatgcccacatccaaaagctagaaagatctgaaatcaacacccgaacatcaaaatgaagagaactagagaagcaagagcaaacaaattcaaaagctagcagaagacaagaaataactaagatcagaacagaactgaaggagatagagacatgaaaaacccttcaaaaaatcaatgaactgtttttttttgaaaagattaacaaaacacaccattagctagactagtaaagaaaaagagaggggtggagccaagatggctgaataggaacagctccagtctacagctcccagcgtgagcaacgcagaagacgggtgatttctgcatttccaactgaggtaccgggttcatctcactggggagtgtcggaaagtgggtgcaggacagtggttgcagtgcaccgagcatgagccaaagcagggcacgccattgcctctcctgggaagtgcaaggggtcagggaattccctttcctagtcaaagaaaggggtgacagatggcacctggaaaatcaggtcactcccaccctaatactgcgcttttccaatggccttagcaaacggcacaccaggagattatatcccgcacgtggctcagagggtcctacacccacgtagcctcactcattgctagcacagcagtctgagatcaaactgcaaggtggcagcgaggctgggggaggggcggccaccattgccgaggctagagtaggtaaacaaagcagccgggaagctcgaactgggtggagcctaccacagctcaaggaggcctgcctgcctctgtagactccacctctgggggcagggcatagacaaacaaaaggcagcagaatcctctgcagacttaaatgtccctgtctgacaactttgaagagagtagtggttcttccagcatgcagctggagatctgagaacggatagactgcctcctcaagtgggtccctgacccccaaatagcctaactgggaggcaccccctagtaggggcagactgacacctcatatgtctgggtactcttctgagacaaaacttccagaggaacaatcaggcaacaacatttgctgctcaccagtatccgctgttctgcagcctccgctgctgatacccaggcaaacagggtctggagtggacctccagcaaactccaacagacctgcagctgagggtcctgactgttagaaggaaaactaacaaacagaaaggacatcctcaccaaaaccccatctgtacatcaccatcatcaaagaccaaaggtagataaaactacaaagatggggaaaaaacagaacagaaaaactggaaactctaaaaatcagagcacctctcctcctccaaaggaacgcagctcctcaccagcaatggaacaaagctggacagagaatgactttgacgagttgagagaagaaggcttcagacaatcaaactactccaagctaaaggaggaagttcgaacccatggtaaagaagttaaaaaccttgaaaagaaattagatgaatggctaactagaataaccaatgcagagaggtccttaaaggacctgaaggggctgaaaaccaaggcacgagaactatgtgacgaatgcacaagcctcagtagccgattggatcaactggaagaaagggtatcagtgatggaagatcaaatgaatgaaatgaagtgagaagagaagtttagagaaaaaagaataaaaagaaacaaacaaaacctccaagaaatatgggactatgtgaaaagaccaaatctatgtctgattggtgtacctgaaagtgactgggagaatggaaccaagttggaaaacactctgcaggatattatccaggagaacttctccaatctagcaaggcaggccaacattcaaattcaggaaatacagagaacgccacaaagatactccttgagaagagcaaccccaagacacataattgtcagattcaccaaagttgaaatgaaggaaaaaatgttaagggcagccggagagaaaggtcaggttacccacaaagggaagcccatcagactaacagctgatctcttggcagaaactttacaagccagaagagagtgggggccaatattcaacattcttaaagaaaaaaattttcaacccagaatttcatatcctgccaaactaagcttcataagtgaaggagaaataaaatcctttacagacaagcaaatgctgagagattttgtcaccaccaggcctgccctaaaagagctcctgaaggaagcactaaacatggaaaggaacaactggtaccagccactgcaaaaacatgccaaattgtaaagaccatcgaggctaggaagaaactgcatcaaccaatgagcaaaataaccagctaacatcattatgacaggatcaaattcacacataacaatattaaccttaaatgtaaatgggctaaattctccagttaaaagacacaggctggcaaattggatagagtcaagacccatcagtgtgctgtattcaggaaacccatctcccatgcagagacacacataggctcaaaataaagggatgtaggaagatctaccaagcaaatggaaaacaaaaaaaggcaggggttgcaatcctagtctctgataaaagagactttaaaccaacaaagatcaaaagagacaaagaaggccattacataatggtaaagggatcaattcaacaagaagagctaactatcctaaatatatatgcacccaatacaggagcacccagattcataaagcaagtccttagagacctacaaagaaacttagactcccacacaataataatgggagactttaacaccccactgtcaacattagacagatcaatgagacagaaagttaacaaggatatccaggaattgaactcagctctgcaccaagcagacctaatagacatctacagaactctccaccccaaatcaacagaatatacattcttctcagcaccacactgcacttattccaaaattgaccacatagttggaagtaaagcactcctcagcaaatgtaaaagaatagaaattataacaaactgtctctcagaccacagtgcaatcaaactagaactcaggattaagaaactcactcaaaactgctcaactacatggaaactgaacaacctgctcctgaatgactactgggtacataacaaaatgaaggcagaaataaagatgttttttgaaaccaacgagaacaaagacacaacttaccagaatctctgggacacattcaaagcagtgtgtagagggaaatttatagcactaaatgcctataagagaaagcaggaaagatccaaaattgacaccctaacatcacaattaaaagaactagaaaagcaagagcaaacacattcaaaagctagcagaaggcaagaaataactaagatcagagcagaactcaaggaaatagagacacaaaaaacccttcaaaaaatcaatgaatccaggagctggttttttgaaaagatcaacaaaattgatagaccactagcaagactaataaagaggaaaagagagaagaatcaaatagacacaataaaaaatgataatggggatatcaccacagatcccacagaaatacaaactaccatcagagaatactgtaaacacctctatgcaaataaactagaaaatctagaagaaatggataaattccttgacacatacaccctcccaaggctaaaccaagaaaaagttgaatctctgaatagaccaataacaggtgctgaaattgaggcaataattaatagcttaccaaccaaaaaaagtccaggaccagatggattcacagccgaattctaccagaggtacaaggaggagctggtaccattccttctgaaactattctaatcaacagaaaaagagggaatcctccctaactcattttatgaggccagcatcatcctgataccaaagcctggcagagacacaacaaaaaaagagaattttagaccaatatccctgatgaatgtcgatgcaaaaatcctcaataaaatactggcaaaccaaatccagcagcacatcaaaaagcttatccaccatgatcaagtgggcttcatccctgggatgcgaggctggttcaacatacacaaatcaataaacgtaatccagcgtataaacagaaccaatgacaaaaaccatatgattatctcaatagatgcagaaaaggcctttgacaaaattcaacaacccttcatgctaaaaactctcaataaattaggtattgatggcatgtatctcaaaataatgagagctatctatgacaaacccacagccaatatcatactgaatgggcaaaaactggaagcattccctttgaaaactggcacaagacagggatgccctctctcaccactcctatttaacacagtgttggaagttctggccagggcaatcaggtgggagaaggaaataaagggtatttaagtaggaaaagaggaagtcaaattgtccctgtttgcagatgacatgactgtatatctagaaaaccccatcatctcagcccaaaatctccttatgctaataagcaatttcagcaaagtctcaggatacaaaatcaatgtgcaaaaatcacaggcattcttatacaccaataacagacaaacagagagccaaatcatgagtgaactcccacttgcaattgcgtcaaagaaaacaaaatacctaggaatccaacttacaagggatgtgaaggacctcttcaaggagaactacaaaccactgctcaaggaaataaaagaggatacaaacaaatggaagaacattccatgctcatgggtaggaagaatcaatatcgtgaaaatggccatactgccaaggtaatttatagattcaatgccatccccatcaagctaccaatgactttcttcacagaattggaaaaaactactttaaagttcatatggaaccaaaaaagagcccgcattgccaagacaatcctaagccaaaagaacaaagctggaggcatcatgctacctgacttcaaactatactacaaggcaacagtaaccaaaacagcatggtactggtaccaaaacagcatggtactggtaccaaaacagagatatagaccagtggaacagaacagagccctcagaaataataccacacatctacaaccatctgatctttgacaaacctgagaaaaacaagcaatggggaaaggattccctatttaataaatgatgctgggaaaactggctagccatatgtagaaagctgaaactggatcccttccttacaccttatacaaaaattaattcaagatggattaaagacttacatgttagacctaaaaccataaaaaccctagaagaaaacctaggcaataccattcaggacataggcatgggcaaggacttcatgtctaaaacactgaaatcaatggcaacaaaagccaaaattgacaaatgggatctaattaaactaaagagcttctgcacagcaaaagaaactactgtcagagtgaacaggaaacctacagaatgggagaaaatttttgcaatctactcatctgacaaagggctaatatccagaatctacaaagaactcaaacaaatttacaagaaaaaacaaacaaccctatcaacaagtgggcaaaggatatgaacagacacttctcaaaagaagatatttatgcagccaaaagacccatgaaaaaatgctcatcatcactggccatcagagaaatgcaaatcaaaaccacaatgagataccatctcacaccagttagaatggcgatcattaaaaagtcaggaaacaacagatgctggagaggatgtggagacataggaacacttttacactgttggtgggattgtaaactagttcaaccattgtggaagtcagtgtggcgattcctcagggatctagaactagaaataccatttgacccagccatcccattactgggtgtatgcccaaaggattataaatcatgctgttataaagacacatgcacacttatgtttattgtggcactattcacaatagcaaaaacttggaaccaacccaaatgtccaacaatgatagactggattaagaaaatgtggcacatatacaccatggaatactatgcagccataaaaaatgatgagttcatgtcctttttagggacatggatgaagctggaaaccatcattctcagcaaagtgtctcaaggacaaaaaaccaaacattgcatgttctcactcataagtgggaattgaacaatgagaacacatggacacaggaaggggaacatcacacaccagggcctgttgtggggtggggggagggggcaggatagcattaggagatatacctaatgttaaatgatgaattaatgggtgcagcacaccaacatggcacatgtatacatatgtaactaacctgcacgttgtgcacatgtaccctaaaacttccagtataataaaaaaaaagaaaaagagaaaaatcaaataggcacaacaaaaaatgatgaaggagatatcaccactgatcccagagaagtacaaactaccatcagagaatactataaacacctctatgcaaataaactagaaaatttaggagaaatgaataatttcctggacacatacatcccctcaagagcaaaccaggaagaagttgaatccttgaatagaccaataacaagttctgaaattgaggcaataattaatagcctaccaaccaaaaaaatcccaggaccagatggatttacagctgaattctaccagaggtacaaagaggagctggtgccattacttctgaaactattccaaataatagaaaaagaggaactcctctcagtcatcctgataccaaaacctggcagggacacaacaaaaaaagaaaatttcaagtcaatatccctgatgaacatcgacacaaaaatcgtcaataaaatactggcaaactgaatccagcagcacatcaaaaagcttatccaccacaatcaagtcggcttcgtccctgggatgcaatgctgggtcaacgtacacaaatcaataaacgtaatccatcatataaacagaaccaatgacaaaaaccacacgatttcctcaatagatgcagaaaaggcctttgataaaattcatcatcccttcatggtaaaaactctcaataaactgggtattgatggaacatatctaaaaataataagagctatctatgacaaacccatagccaatattatactgaatggcaaaagctggaagcattccctttgaaaaccagcacaagacaaggatggcctctctcaccactcctatttaacatagtattgggagttccggccagggcaatcaggcaagagaaagaaataaaggtaatcaaataggaagagaggaagtcaaactatctctgtttgcagatgacatgattgtatattttagaaaaccccattgttggctgggcatggtggctcacacctgcaatcccagcactttgggaggccgaggcaggtggctcacctgaggttgggagttcaagaccaccctgaacaacatggagaaaccccatctctactaaaaatacaaaattagccaggcgtggttgcacttgcctgtaatcccagctacacaggaggctgaggcaggagaattgctagaacccgggagacagaggtttcggtaagccaagcttgcaccattgcgctccagcctgggcaacaagagcaaaacttcgtctcaaaaacaaacaaacccattgtctcagccccaaaactccttgtctcagccccaaaactcctaaagctgataagcaacttcagcaaagtctcaggatataaaatcaatgtgcaaaaatcgcaagcattcctatacaccaataatagacaagcagagagccaaatcatgagtgaactcccattcacaatcactacaaagagaataaaatacctaggaatacaaattacaagggatgtgaaggacctcttcaaggagaatgacaaaccactgctcaaggaaataagagaggacacaaacaaatggaaaaaatttcctgctcttggataggaaaaatcatcgtgaaaatggccatactgcccaaagtaatttatagattcactgctattcccatcaagctaccattgcctttctttgcagaatttgaaaaactactttaaatttcatatggaaccaaaggagcctgtataaccaagacaatcctaagcaaaaataacaaagctggaggcatcatgctacctgacttcaaactatactacaagactacagtaaccaaaacaacatggtacaggaaccaaaacagacttatagacgaaaggggagacagaacagaggcctcagacaaaacaccacacgtttacaatcatctgatcttcaacaaacctgacaaaaacaagcaatggggaaatgattccctacttaataaatggtgctgggaaaactggctagccatatgcagaaaactaaaactggaccccttccttacaccttatacaaaaattaactcaagatggattaaagacttaaacctaaaaccataaaaaccctagaagaaaacctaggtaataccattcaaaacataggcatgggcaaagacttcatgactaagacaccaaaagcaatggcaacaaaagccaaaattgacaaatgggatctaattaaagagcttctgcacagcaaaataaactatcatcagagtgaacaggtaacctacagaatgggagaaaatttttgcaacctatccatctgatatagatctaatatccagaatctacgaggaacttaaacaaatttacaagaaaaatcaaacaaccccatcaaaaagtgttggaaggatatgaacagacccttctcagaagaagatatttatgtggccaacaaacatatgaaaaaaagctcatcatcactggtcattagagaaatgcaaatcaaggccgggtgtagtggctcacgcctgtaatcccagcactttgggaggccaaggcaggcagatcacgaggtcaggagatagagacaatcttgactaacatggtgaaaccctgtctctactaaaaatacaaaaaaaattagccgggcgtgctggtgggtgccagtagtcccagctactcaggaggctgaggcaggagaatggcatgaacctgggagatggaggttacagtgagcagagatcatgccactacactccagcctgggcgacagagtgagactccatctcaaacaaacaaagaaacaaacaaaaaaagagaaatgcaaatcaaaaccacaatgagataccatctcacaccagttagaatggctatcactaaaaaattgggaaacaacagatgctggcaaggcgctggagaaatagggacacttttatgctgttggtgggagtgtgaactagttcaaccattgtggaagacagtgtggggattcctcaaagatctagaaccagaaataccatttgactcagcaatcccattactgtgtctatagccaaaggattatacatcattctactttaaagacacatgcacacatatgtttattgcagcactatttacaatagcaaagacttggaaccaaccccaatgcccaacaatgatagactggataaggaaaatgtggcacatatacaccatggagtactgtgcagctataaaaaacgatgagttcatgtctttgcaggaacatgggtctagctggaaaccatcattctcagcaaactaacacaggaacagaaaaccaaacactgcatattttcactcataagtggtagttgaacaatgagaacacatggacacagggagcagaacatcacacactggggcctgtcggggggtggggggcaaagggagggagagcattaggacaaatacctaatgcatgcaggacttaaaacctagatgatgggttaataggtgaagcaaaccaccatggcacgtgtaaacctatataacaaacctgcacattctgcacatgtatcccagaacctaaagtaaaataataaaataaaataaaatacacttactatagaattaagccattccactcctaggtaattatccaaaaaacaaaaaacaaaaaagaaagcatgcatccacacaaagacttgtatatgaatgttaataaccatttcatttgcaacagccaaaaatagaaaaaaacctaaatggtctcttttgctgatgcccagataaacaaattgttggatataaacaatggaatactattaagcaataaaaacagtgaacttctgatacatacaacaaaaatgaattgtgtaataattatgctaaataaaaaaagccataaagagtttaaaaaatcatactcttaatttttatgtgataaaatgtccttctccttaatggaatactgtgaagagagattcttttttatggaatattgtctggttatatgtgtgtgtgtatgtgtgtgtgtgtgtgcagatacacatgtgtatgtttagtgtgcttacttggcaaaggaggagtggaaaactctttgtcttctccccttaaccttttaaggaaaattttattgtttctaaagttccaagatctgggaatcactgttttgttcagtatcaatcataatcctaaaatacatagtcccaaatgttgaaatcctgaaaacttgaaatccgtaaaagtcgctaatatctaaattgctaataactaaaatcttgaaaattatacccctgaaagattaaattccaaatgtttaaatcctgaaagctgaattctaaggaaggaattagtgtgttttttattttatgcaagatagatgcattatgctcgttgcaccatgttaggcagaactattacctcgttactgtcattatttggaaattaagtatggtttaaggagatgcatatgggtgccaagttttgtggatttaattttaggtgttaacttgaatggattaagggatacctagaaacctggtagggcattattttgggtatgtgtgtgaaggtgtttctggagaagatgagtgtgtgagtctgagtggactaggtggggaaatcctttcctctgtgctggtggacaccctctaatcggcagggggcacagagtgaacaaatatagaaggagaattggtctctctctgagagctgagacacttttctttttgtttttttgagacagagtcttactctgtccctcagggtggaatgcagtggttcaatcttggcttaccgcaacctccgcctcccaggttcaagcgattctccatgtctcagcctcctaagtagctggaattacaggcatgagccaccacgccggctaatttttgtattttttagtttcaccatgttggccaggctggtctcgaactcctgacctcaagtgatccttctgtcttggcctcccaaagtgctgggattacagctgtgagccaccatgcctgacctgggacagacttttttctgccttgaacatcagaactccaggcttgctgacctttggactccagagcttacaccagtggtctcccagcttctgagacttttggcctcagacaaagttataacattggctttcctgattctgaggccttctgagttggactaagccacattactcacattccagggtctccagcttgcagactgttggacttctcagccaccataattgcatgagccaattccactattagattccctgtcatgtgtctatatacatatcttactggttctgttactctggtgaaccctaacacagattcgatactgggaaagccaaatattattccttcttactgcatttcttgaaacacaaaggaagagatcagtgaaattatccccatgcataaaggctgtgataaattaagtgtacaaagctacttaactatgaaagatataagtttgaaaattaattattattggtgttgtgaaagtagaaaattgtttaattgcaatggccaagcaataaccagattttcaaatggacagcatatacttacaaaatttataggttacaaccactctctaaacacaagtgcagcaagtatttcaatcatagaagtgaaaacacagaagaaatctcttctgccaaattattcaatcacatgtaacttctgccacttccacattgtgtcaatttgctatgctacgtatcttatctttgcatcatttccaatactggaggtataaattgtgcaaaaacttttagagagtgctaatttattttatgcattttttttgcaaatttgactccacaaaagtgcattggcacaaggttctttccgtgtaagtattgtgtatgtatataaaaatgttgaaacttcctcagtaaatgaagagatgtcccttttgtacatctgcatttgtgaaagataaaattctcaagctctcaactctttgggtgactgcatatgtggtgatgaccccatcatggtctttgattgatcttattaaaagaattaggttaggggccaggcacggtggctcacgcctgtaatcccagcactttgggaggcagaggtgggtggatcacgaggtcaggagttcaagaccagcctgatcaacatggtgaaaccccatctctactaaaaatacaaaagttagccgggtgtggtggtgcacacctgtaatcccagctactcaggaggctgaggcacgagaatcacttgaacccagggaacggaggttgcagtgagctgagatcatgccactgcactccagcctgggcaacagagtgagactccatctcaaaaaaaaataaaaaagaattaggttgtctgatatggtatttcagatgactgcagttataaagctgggagctcacaactaccaaccatagttacatgggtttatacattttgcttttgacatatttcttttttaaaaaataaacttttattttatgttcagaggtacgtgtgcagatttgttatatagataaacacgtgtcatgggggtttattgtacagattattttgtcacccaggtactaagcctagtacccagtagtaatttttttctgatcctctccctcttcccaccctggctccactctcaactaggccccagtgtctattgttcccctttttgtgtctatgtgttcttctcatttagctcccacttataagtgagaacatgcggtatttgttcctgttcctgcattagtttgctaaggataatggtctccagctccatctacattctggcaaaagacaagagcttgtttgttttttatggctgcatagtatttcatggtatatatttaccatattttctttatccagtctaccattgatgggaatttaggttgattctatatctttgcgattgtgagtagtgttgaagtgaacattcgagtgcatgtgtctttatggcagaatgatttatattcttttggatatatacccagtaatgggattgttgggttgaatggtagttctgtttttagctctttgaggaatcactacactgctttctacaatggttgaactaatttacactctcactaatagtgtacaagcattcccttttctctgcaaccttgccagcatctcttattttttgactgtttaataatagtcattctgactggtatgagatggtatctcattatggctttggtttgcatttctctaatgatcatgatattgagcgtttttttttatatgcttgttggcctcatgtatgtcttcttttgaaaagtgtctattcatgtcctttgcccactttttttatgtggatgtttgttttctttcttgaaaatttatttaagtttcttatagatgctggatattaggcctttgtcagatacgtaatttgcagatattttctcccattctgtatgtttgtttctgtatgtttgcttactctgtcgatagtttcttttgctttacagaagctcttaagtttgattagatcccatttgtcaatttttgcttttgttgcaattgcttttggcatctttgtcatgaaatctttgcagttcttatgtccagaatggtatcacctaggttgtcttccagggttttttcagttttgggttttacattcaagtctttaatgcatcttgagttgatttttgtatatgatgtaaaaaaggggtccaatttcagtcttctgcatatggctagccaattatcccagcaccattttactgaatagggagtcttttccccattgcttgtttttgtcagctttgtcaaagatcagatggttgtaggtgtgcaggtttatttctctgttctctattctgtttcattggtttgtgtatctgtttttgtaccagtaccatgctgttttggttactgtagccctgtagtatagtttgaagttgggaaatgtgatgcttcctggtttgctctttttgcttaggattgccttggatattagggctcttttttggttccatacgaattttaaaatagtgtttttctagttctgtgaagaatgtcattggtagtttgataggtattgcattgaatctgtaaattgcttttggcagtatggtcattttaatgatattgattcttcctatctatgagaatggaatgtttttccatttgtttgtatcatctctgatttctttgagtagtgtttgtaattctcattgtagagatctttcatctccctagttaatgatattcctaggtattttattctttttgtggcaattgtgaatggaattacattcctgattttgttcttggcttggccattgttaatgtataggaatgctagtgatttttatatgctcattttgtatcctgaaactttgctgaaattgtttatcaattaaagggctttggggctgagactatggggtttctagatatagaaacatgtcgtttgcaaacagggatagtttgacttcctctcttcctatttggatgccttttatttctttctcttgcttgggcttccaatactatgttgaatagaaatgatgagagagggcattcctgtcttgttctggctttcaaggggaatacgtttagcttttccccaagacatatttctttatgaatacagtttgtctgtctgtctgtttgtctgtttgttttttgagatggaatctcactgtgttgcccaggctagagtgtagtggtgccatctcagctcactgcaacctccgcctcctggcttcaagcgattctcctgcctcagcctcctgagtagctgggattacaggcgcccagcaccacgcccagctaatttttgtatttttagtagagacagagtttcaccatgttggtcaggcttgtctcaaaccctgatctccggtgatccacccacctcggcctcccaaagtgttgggattacaggcatgagccactgcgcccggccagtttgtctgcttataactgccacacttgtgcaactgttgttagtatacctgagttttattcttgcaaaaatatgtcattatcattgcccattttattgcaaaaagtggcatatgaagtgttcagctatgtttttacgtgtttctcaagtaagtttccttttaaaaatgtaggctgggtgcggtggctcatgcctataatcacaacacttgggaggccaaggtgagtggatcacttgaggtcaggagtttcagaccagtctggccaacatagcgaaatcccatctctactaaaaatgcaaaaaattagctgggcatggtggtgtgcgcctgtacttctgggagtttgaggcacgagagtcacttgtaccgggaggcagaagtttcagtgaaccaagattgagccactgcactccagcctgagtgacaaagtgactctgtctcaaataataataataataagtaataaaaatgaaaatgtaaacaaatgtcttttaaataattttttaaatttattttttccagagttttatttttggaattttgacttttcaggatggtgatttttgggattttaaggattttgatcttttgggatttcaacatttgggattatggccttcaggattgtgtcttttggggttacggcccaaacctgtattatccatgggttgaatcctataacactggaaggtcaaagtgagagagttcatcttagcctattgcttaaaaaattaataaattctattttagaacagttttaggtcgacagaaaaatgagcagagagttgccataaacctccttgtatccctctacaagtttctcttagtaacattttgcattattgcaatatatttgttgcaattgatgagccagtattgatacattattattaactaaagcccactgtttacattaagcttcgctcttggtgctgtacgtcagggtttggtaatatataatatatatccaccactacggtgtatactgaatagtagtactgtcctaaaatgctctgtgttgtacctattaagcatccctgcctcctctcggccttttggcaactgctgatcgtttgattgttgccatagttttgccttccctggaaggtcacatagttggaatcatacagtatgtagcccttgcagattgacttctttcatttatcaatatgcacttaaattcctccatgtctttttgtggctcgatagtttatttctttttataatattccattgtatgcctacactactgtataatattccattgtatgcctatactactgtttatttttacattcacctactgaaggagatcttggttgcctccaagttttggcagtgatgaataaagtggcatcttatcctgttttttgcatttaaacatacatgatgtagtattaatttgccaccgatgatgtactcattatgaaattttagaaagcgcagaaaatactttaaaaaatactattggtaatctcatgccaaatataacactagtagctgttatgtatatctatgttttcttttcttttcctaaatcaatatctatgtctgaaagcttatttttgcctatatatgcctcaattaattgttcttataagctcaagtattatattctatagttttgtattcttgtgtttttctccccacttaatattatatgcacatcatggaagatggggtattcactccctcaagcatttatcctttgtgttgcaatctaattatattcttctagttatttttaaatgtacaattaaattattattgacgatagtcaccctgttgtgctgtcagatactaggacttattcattaattttaattatttttttgtacctattaaccatcccctccccttctcctccccaccacccggcaacctgttttgttcatcgatgattcttcagtacacagaagagtgtctactaggcaccccaaaaatatctgttgaataagtgaaggaattgtatttttgaaatttgcatgatctcgttagctattctttggaatcaaaccaaagtttacttgtagtaaaagttattgcctgttaaattgagaatcaaaataatcatgcagtcttacagtgtttttaaggaactgatttctatagtggctttctcatatagttagtgatggcaatgtttttaccagctcatcattagcatgttctgcaacttgagggtttttcagtgatggggtaatattgttcctgccctgccccttctcttgagaataatggcacacggttgctaagaggctggtagggattaagcattctcttgagcaaaacaacactggtttgtgctggaaataactttaacttggtggtagcaatgcgctgctgacagggtcccagctagaacatgcattcttcaccatcttgaggcttccttgatgagaaccactcactgagagcagtttgtaaggttcatcaaggctgtgccttgccctccatgtatttcctgtagatttcctgggaaaccaacctcttcacttcagctgacctgaaatccccacaggtccgctcaaatgctgtatttgtttgcatccaacaaagtggaagtatagggagtgtcagtaataacatactgtttacatgggtgatagctgggaagagaaattcaccaggaaatcctggtgagactcttacattcaccaaggtgtgtggcagtgggcagactcaggagtcttcagatttcagagcaaggacctgcagcataagcaggaagaggagaaagggtgttgtcagggtgagagattatggagtcaaaggcctggaacagatgttatgtacttttaagtcttagtgaaggctagctctgttcaacaccttgcagttctattgggcgagttcataaattaaagccatctccataaaatgccattccagactaacatatgggattgacttaatttttccatttaaaaatgcctgctttatagtataagctttaaaattgctttctaagtaatgcatttaaaaaaatccgagtaggcgtgtatccatggttatggcaatgatgatagcaaagatttctgaagatagggtttttgtcctagatttttatagggtttctatttatccaccttgcttctgttttccttcagctctttttatatgatttgaaaatttgtttgccagtttttttgttgttaaaaaatttaacattatttaacatttttattttactcattaattcatttattctatcagtatttattgaatacctaaaatatgtggagcattttagacacaatgagaaatagaaaacttcaaatactctaattgaatagatgacataaacaaatctagacaggtaattaaaatacagtgtaatgttttaagaacacataggaggggcacttaaccaaaaattaacatgagaagattttcaagagtaaatgcggtctaaactagaagtagtaagaagctggaagtggagatgaggaatgaagaagtgcatctcaagagaaagaggcagcatgtgcaaaggtcctgaggtgacagaccacatggctggtcagagacctgagagtagctcagtgtgattagtgtatgaagtaagaagtaggaatggtgagagatgtgactgtggaggaaaactaggtctttattaggacaaacctcaaaaatcatattaaggaactcatattaaagacaatgggaaataattgaaggttactgtgagtgagtaggattagatagtccatttagaaagcacacattgacttccccatggaaaataacttggtaagggacaatttgcaaggcagggagacagaagacagcaaattatccagttaagagttgatgatagcctatcttaagataaaggcagtggacttaaagagagtagatcaatttgaaaaccatagtagaattactatggcttgataattgatggccagagagggtatataaaggagaaagataagggaatgatattgactctcttagtgtggtttctccctaaaagcaagtctgtgtcaataactgggatgcaggaagtttattttagagatgatcccaagaaataagagtgacagaatgaggagagtgtgttagggaaggagaaaatctaattcagggaaggaagaaagccagtaaagggtgcattattgaactatttattgctgtaaaaccctggggcacatattgtaggaattccctgagaaaccatgttgaaagcttttcagaagtgaccctttgaaagactgaagactgagcctttcttctctgactctcatttctctttggtttagggttgcctccagggatgttaactcctctatgcttgaaagctgctgagcaggttattagaattctaaagaaaacctgaggtaaaaaatatgagagaatgacttgaagtgaaactacaattagaggtgggctaagaggatatgatgtggggtacaagtagggtctaatacagtgaccatgtttctggcacaggtaactggatgagccaacatacattgaattcttgaaatatttttgagacatccatgtggtgacatccagtaggtagagggatacagtctggcattcagagctggcaccacagtaatgagtttaggagccacagtctaatcagagggagtgtattagttttccagggctgccctaacaaaataccacaggctggatggcttaaaaaacagaaacatattgccttccagttctggaggctgctgacaggattgatttcttctcaggtctctccctggcttgtggatggccatcttctccctctgtctttacatagtctttcctctgtgtctgtgtctgaatttcacctttttataagaatgccaatcatactgtattagggcccacccatgtgacttcattttaccttaattacctctttaaaggccttatctccaaatagagtcacattctgaggtactgggggttaggaattcagcatagcaatttttttttgtgggggatgggacacaactaagcccataacaggtagcaatcgacacaaagggaatagataaggtgttcaagaagcatgtgtagaatgagggaaagaacaaggtttgaagggataccaacatttaaaatgactagcatttaacactaacaaaacaatacgaaaaatggaaggaaaactgggaaagtgtggcttcctggaagtcaagggcaggactgcttgaagacggatggagtagtcagccaatgcccagtgctcctgagaggcccagtagaggaagatactgtgagattgttgagcttatgggttggtgtttgaaaagaaggtgaaaacttgtgctgggagaaggagcatcttcaggacaccaccgagtaggtgtataggtttgggtgctgctgggaagaagccgcaggtgggtgaggaaagggctaaagaggaaggaaagagagcagctgactggcttgcagcagtggaagagaaaagtgtccatagctcagacacggaattcatcttagatgagtgtagagtcaccacttccacgtaactagggtggaaggaggaggtaatgtgaaaaatgattggagagtaatagggatatgagcagagctttgagggagagagaagttcgtttgaattaaactaaagtttgaagtaagatgtgataaaagagcatacaaatgtatatttaaataatttctatgttgtgaagtccaatatcacttcatcattgaaatttctcaaatctttcttcatgaaatcagtattgtcacgacatccttttaaaaaagatgagttcagtggaaatatgaacataatgtattaataaaattattgttattatgtacacacatagatgactaaaatgctgttgttatattaactcatgtccaaaaggtagcttgaataaaacatatagtgttcttcttctatggaggccttgatagaaagtatagcaatttaagaaagtgtaataattcatccctgatattttcagttagcaaagttacagtatctttaatatgctgctttatcttgctattaagctgctgtttactaccgataaacaaggcaaccagaaaatggaaaagacaaatttatgtggatataagtggtgattactgtaaactatcacatcatagactaatgtgatcatagcccccttcaaattagatactgcattttatgaatacatttaacagtgctccttaattttctctttttattcagttcattgtgctaaatttctgctggcccacagaataagaactgagcaagaaatcttcatttattgcatatatttgcataatatatgatttcatattcctcatctgtaaattgctttaatatccaggaggaagttgttttttctcatttaatataattaagataataatcttacatgccaatgaaattataaggtggtgttgctgctgagggattttagtggaaattaaactgatttgacagttcaaagttcttatcccagtttgcattttatcatatatccacttagatatcacagaaaggccctttggtcttaagtcccttaatttccaaatctgtaaattaaaagttaaacaccgctttttcctaatacataggatgaatgtgaagattagtatcttctaatagctgtggaaggtgcaatataaagacatcataatttaccttgggataaaatataagtgataatgtatgctggcacagcatgtatgcttcatattagtagtaacttccaaattcttgaaaaattataacaaaatccttgcaaaatattaccatccataaacaaagagtgtttatatccaaatggaaattttatgtactaaatgtaattaaaaatctaaaagcaaatgtatttcatcaattttctttgaggatatatgaagtaccagggcctggagtatggttaaaaaatacatctatcccctgtctttttggaacttacagagtctagtaagtgaaacagagaatagctacattaaaaataaacatataatattacatgtcataaagaaaaataaagtacaataaattactttgacaaagctatcttctggggagtggagagtgggatgagggatcatgaccagaatgagtgcattcgagaatgggaggagcagaagtaaatacagcaattgtaggtaactcaagaaatttgccatcaaaagtaagcaaaacaataaggcagtagcttaagagagatgtagggtcaaggaaacttctaagagataagagataatgttttctgctcatgggaataatttagtatagagtgggaaactgatgacctataagtctcctagggctgctgtaacaaagtgccacaaactgggtgactttactgtctcgcacacagttttggacgctaaaagtctgaaatacagttgttggcaagggccatgctcccgtgaaacctctagggtaatctttacatgccttttcctagcttctggtggttgctggcaatctttggcatttcttggcttgcaaccgcataatccaatctctgtctttgtcatcacatggcgttctccctgtgtgtccctgtgtgtcttcacatggctatcttcttaaaaggacagcagtcatatcggatcaagggcccaccctgttagttaagatgacctcatcttaactaattccatctgcaacaaccctatttccaaacaaggttacattctgagttactgaagtttaggacttcagcatatcttccttttggggacacaattcaacccataacaaatagagcagtagcttgacagagatgtagggtgaaaggaacttttaagagaaaagagacaatattttctgctcatgggaatgatctagtccagagccgatgatatagtaggagaaagaaggttagaattgtggagacaaataacttgagtaggaaagaggatgagatccactggaaggctggtcttgcaagaaagcatggaaaattcatttgctgtaatagaacagaaggcagagtttaagaattcagataaggttgggttgtagattttatgatggcaaaagtttctcttttcagtgtttatatttttttagtaaagaagaaatacatttccttccttccttccttccttccttccttccttccttccttccttccttccctttctttctctctcttttctttctctttctttctctctttatttctctctctctttctctttctttctttctctctctctctctttctttctttctttctctctctctctcccccccttcctccctgctcactctctctctcccctccctccctccctccctccctcccttccttccttccttcctctttcattctctcctttatcttttttttctttttttgtgataggatctctctctgttgccaaagttgcagtgtagtgatacaatctcagcccactgcagcctcaacttcctgggctcaagccatcctccccactcagcctcctcagcagctgggattacagacgtgtgctaccatgcctggctaattttttaaaaaaactttttgtagagatgatgtctcactatgttgttcaggctagtctagaactcctggctcaagaaatcctccagcctcggtctctcaaagtgttgggattataggcgtgagccactgcatctggccacaaatgtttctgatatgaaattcagaccaatgtcctaatcatcattagtatccttttagggcattgtgggatatactggaaaaggaaagaagtatatgaaagcatagcaccatgcttgagatacacatgcacatacttttatacattttacatttactgagcctctgctatgtggctttatgctagacactttatatatactatctactttaatcctcacaacatttctaatggcattccctggccaaaaaatgcctctttttccatatatacttatactatctaaatattaaataagctcacgtcataggccagaggctactagcgcacagtcacgtgaacaggtcctttgaaggttgttatgtagtcagtacaaagttgagaatcatagagttttacaactttttaaaaagaaatatttaggatatagattaaagaacaattaaaaaataaaaaagcaagtattttaacaattttaaaataattgaaggtaaaaatacactgtgaccaagcacacctaggttcttcataacaaacttcataggctgatcaaacactgcagtctctttgtactttaacctgggctcttggcaagaagcccagtcagtaggcattcttttgtttgtttgtttctcaaatgtagatcagcttattaataggtaatggtcttgatcatctctatcaatatttatatcaaaagaagattataaatttgaaatatgtattgcttatgatttttaactttgacttttgttttaaatgaatcgacattttaaaacaaatttgttcttctgtattttgtctttgatttaaattcactcctaatacttaagaatacacactatatgcaaagtgttcttgtctggttaaggcaataaattaattttctacatattcacataccagaattgaaatgtcagataacaagtcaagcaaaggttatacaaggaaatgaacatctgtaagaaaatgatggccgttagccgatgacatgttaatctgaatggtatagtgagaatactgttatcttcaaaataggcttccatcaggtctatcccatagacctaatttctccggagtgattatgtcatcataataactgcggattagagaggataattatagatattatttttgttgatggtattgtttctatagtcataaacattgagttctacagtgtcaacagggacataggtgagttaaaaaaaaaacagtgataaacattctctatttatcttaaaacccaggcatctctgaactaactctgcaaacgggtttgatatgatttggtctgtgatgatgcccaactccattcttcagttctgtacctatcacacaggccaggtgtggtgtttgcagacagtaatgctaaacattccttttctagtcccatttttctaatcttactctccagcattggctaagatggaggacttacaggcttctcttaagataaaagagcagaaaggacatttgagcttatcggctttgactttctgtcctactctctggatggcaaatttattttggctccatgtttgttccaagatttttctgagtatttttaaagattcaaatcctggaatcagaaaatgatacagaacaaaacaggcagtgacctaaaagacataattttgcattttaaagattgaaaactttgacataacattggtaaaagttttctttgtattaaatctcagtagtctaagtaggaagaaacaacttggagaagttgcattttattcctgttttagatactcataagaaaaatttttggtgattttattttagattaaatatttaaagtttatttagacatttagtaatattttagattaaaactctctaacttaattactatccctatgaaatattttagatgaaaactctgtaatgtggtagctatccagaatttattaggtcacctattatatcttactcatttggattttaatgttttagtctaaattttccctttacatgtgggagggtgcagttgcagttgcagttggcaagttttatggagcataataattctggccttggggaatttcttttcctgctaaatatagggtttgcttacttagttcttgtttttacagcagtaggattacagttcaaatatataataagccctcaaggtagtttgaaaataaaagtttgaaaattacagtttgaacatgtgattacacctttaatgagaaaacaaatgagaaatgtcaaaggaaagaacttaattcaatatgtgaaacatattgtcaaacttatcctgttatagaaaatctcttctaccctccttatttcttcctctctttccccctcaaattcacaaatgagaaataataaaatattgaaaacgaatccatatgaactccctattttgctggaattaactccatcgtagcaatttattcttcttttagatgagagaaatgtaggtgattaggcaaatgggactttggaacaaagcagagcacctacttatgcctgtttgttgttaaccttaaaaagactcatgagcttttgtctaagtaaggttttgcacttcttttaacatcaaaaaattgtttcaaatctaaattagtttcaaaactgcagtggaaagcatatttttcatttttagaaagataataaacatgttttgattaacttgaattaatgactggattgtagggttcatagaagacatacaaggtccatatgttgcccacacactttgagaaatacacatttaccaaagaaggcaaagtgtagtgtttgcagactttgtaagtctgcaagaattagggcctggaacataaaaatcattggacattagtaaatctgtcaatttttccatggcaccagacttcatgtcttgcaaatgtttcttctgtctcaaatacaaattgaacatttctttatggttcttaggatattaggatttattatttttggattgcaagtttcttgtgtatttaaaccattatcttttcctgtaaaatctatccttagttttagtttatttttgtgtaaatcatactttatttcaagtgcattgatcctcattaaggcttgaatacaagaatggcttatatataaatgtaaaaccacaggtaccaaatattggtttgtcatttgtttgtgcccccccaaattttttctcttcctgaagtgtaccaaccaaaagtatcagaacaggaaatagaactggaaaacattaaaacagtccatggtaaaatgaaaaattccacacaggtttaaaaaaaaaaagagagagagcagtgttgtctgcagtaggttccctagacctgcagagaactaattttccattctagagaggatgtgctacctggcttgtttggtgttgttatgtgcgtacagacgagcaagtagtgtcacaatgctgtaaatcatgttcaaaatgacttctcaacctggtttggccagtttgaaattttagattttcttgaatatatagcttataaaatgctttgatttatgttatcttaactaattcttgtaataacctcctgagatacacagaattgttaagagactcaaactatgaatattacaaagctgttcacattgtttcagttagaatcagaactcaaatcttcattcttatttcattgttctttccacagcactgtgctgccaggaaaccttgggttaggatagttgatgctcattccttagagaacataaacctcttttaaacagggctttatgatttaaccacaagttacagatgagtacctaataacagtgagagtaaacatgtcatttcacaaaggtgttctgcagcaagaatgtgatgtgaataaatatctggaaaatactgaaactaatcaagaaaattcttatatggatttaagctcttagtagtgcatatactgaaaagagaagactttttctgtttgctttttaaatttccaatagtctcacttaaattcttaagttaaagctatttgcaaattatgtaaaccaaggatatcattaacaaaaataaaaaatgaaaaaatgcaaatagagcttgatcagttatcattttttgttcttaatttttaatatttttagcatgcataaagtttctgaggttaggagatttgaaggaaaagaaggaaagggaagaaagggaagagaagaggctgtaggttcctggtactaaggggttgagaacccaggggagaagagttccttgtcatagtttcatttcataagtttgtctaaggctaggctttgtactaagctcttatcttgaaagcaaaatttttaattgttctcacatgattacatttcccagcagctcaatttcagtcaggctttcggactctgatccttaagagttgggagagtggacatatgggaagtactctcgtggagaattattcatgcctgctgttcagcttaccccatgctgcatcaaagacttggcgttattgagaattcagagtgaaaggagttggatgcttttctgggcttcgtaagacatttattttaaataaatctctgctttttggttagctttcggtgataaagaagcatgccagccacgcagcatggggtcttcctgtttgctgctcaggactttcttctcatcaggtacagggagacaatttactgagccttattctctctgtccccatttagagtctactcaaactttttccatcatctacattttgataactttttattcctttaagtaaaacatgccttttgaaaaaatgttaagtacaggccgggtgcggtggctcacacctataatcccaacactttgggaggctgaggcgggtggatcacctgaagtcaggggttcaagaccagcctagccaacatggtgaaaccccgtctccactaaaaatacaaaaattagctgggcatagtggcatacgcctgtagtcccagctacttgggaggctgaggcaggaggattgcttgaacctgggaggcggaggtcacagtgagccgagatcgtgcccactgcactccagcctgggcgacagagtgagactctgtctcaaaaaaaaaaaggaggatataaaggaaaacaacacatttttctccacagagaaaggtattgttcttccccctttgaatcacctgtcctcagacctacttcttacatttacttcttaaaaggaaaacattgtaaacaacttggcacatattcctcagaactttgttaatgtacacacaaacacgcatgtgcgcagctgtttcattgttttaaaacgtgttctgcctcattttttttaattaatttactcagtatatttccatgttagtatatataaaatttcccaacattctaataataattttaaaatttgtagaattataaagcataaaaaccatgctgagataatgctgggtgagctcaggtgaaacagcagcataaagggtggggacactggttcattagaaaataattgaagaaaagggatgaagaagaagaactaggaagaacataggttagtataatttccaatttcactttctcaatcacattgaagtcataagggtgttatccttgaaacattgactggtgtttattttgtcgtggtgaaatggaaaaagacaagtttgggcttctgttccggtctaaatatgttacttggccatactgcttaactctcctgagcattcttttccttatcccctaaatgacaagattagacttggtgtaatttatggatctttccatttccgattagcacttcaatttcctaggaaaaaacctgagttttgtaaggtataaagtagtctttgtcctgagatattcttggttgttcttgtccatttcccattggccctttgctaggcctattacacgggtcacgttaccctaccattccagcatatattaacacctgcattctgctttagagttgataaagagatttcacatactttatcacatctgattttcacaattattcagtgaggtaaattgagcaggtattattttaatccccattttagagattaggaattaagttaagaggggccttgcagaaatctgattcctacctctactgtctctggtatggatggctgaatagacatagatggtccagatagaatcattatcttggtcttatttgagcattttaggtatggcttatttgtaataatgaggactaaatattgatactgataatacaggataaagaggtttaaattcactgaagagattttgttgttgttgcctcagatgatcataaggaatctttggggacatcattagacaaagacttggaactttgagacttttcctgattctgccagatgctgcctttctattccagattctccaattccaagaaaccccttgcagttctctttattctctcaggcctctcaagcattttattttgcattttcttgtcttggaatgttcttccatttttttttgtctttctgtcaaacttctacttatccttaaagctcagggattacctactctgtaaactatgtgctcactatcatctgcagacactagtgctcctatctatctccaccgcaacatttaaaagtcttcattacagcaaccatctttcaccttcctccaacctgtaactacaagctacttaagagtaaaagaaggagtatcttctcattcttgtattccagacacaatggactgtgatgcaaacgctaaaaatatgtattagtgagtaaattaatttcacagaaaattatactttttgtaaaattttagatttaattttaatgtaatttgttgcaggaacgttctcctttcctcattagtattcaatgtttaaattttaaaattatgaggtacttacagaaaagtggccagcacagtaaaaatacttttattccttctgatccattttagagtaagttgctaatctcatgttatcctggaataatgtaacatgcatttctgcatttttggaccattcccttgctttcaagcacaaggtgatattccaggttcatcctgttctttgtctgcttctggaatcagccctttttctaaggggctctggttctgtttagtagaggatagtaatatttagaagccaagctcagtgccctagttatgctctttgctattagtgtcattgttctcagaccctgtcagtggacagagctggtaattattcataactctctctctctctctctctctctctctctctctctctctctctctctctctctctatatatatatatatatatatatatatatatatatctgtttctacaccgcaaaccatgaattgatactgatctctccaattccaacctaagaccagagggttcgttcattctagttttctccctctccatatttgcaactcccttctgtgataacgagaaaactggctattataatctaatatatttacttatttaatgaatccccttatgtataactaatgtatttctgctgccatcctcttccccactgattccttccttatcctctttgggttctgacacaccgtgccaggctgccatcctcactgcacagactccgatacctcatgctactgctcttcagggtcaccttcctcccccttgcccatctctgacattctgttatgaccacctcaggcctgactgccttcatcaccttctcaggctctgactctccacactggctgactctttctctctcccctagatccatggatgcttcctagctgtgctcagtctctggcacccaacacctggccactactttggtgggcaccctactcttccagcttgggctctgacagatcatgctgggaaggatgctctgctgatcatacttgggtttgatagtcagtgcttgtgcacacacatacacccttatcccattagtgatgcagctctgatttcccatgtctcttcccaaatctggacaccttcaggaccctgcttgggctcctactgtccatgctatgttctctcctacttagatatcctttttttcttgttcaagctccaacacccctctttgggccactatggctcccctccacacagacactgctatactccacctaacgacttccaggctggatggcaaggaagagaagggaagaagagaaaggggtgtgtcatcttttagatttccttattagtccttccacagagaaaatgcatgcatgaaaatgtttacaagaggccagtttgctttatatttgcgatagtcacaaaagatctgaactgagaaaaaactgaaatcattagagaaagtaagatttgaagttaactgtcctttcacttggggaagtgaagtcttatttcttttttaggggtttcatgttttgttctgataagtgacttccaaattagacacttagaaataaaaaggctggaatggagacttgatattcttctgtcccaattatcttgttttacagacaagggaattcatcctggtgaggtcaaatgagtttcccaggtttcccaagtgcctgagtcagaaacgtgacatttttcaacatcctggccagtgtacttggcatgctaccctcattatcatttaaaagtattcgacctttaaggcaaatttctaagaaaaatatattttatacattatacattatattttaaatgggaagtgtttttcttttgtaataatatgacttatagaatttggaccctaaaatttatctggctaggtgcagtggcacaggcctgtaatcccagctgttgaggaggctgaggtgggaggatcactcgagcccaggagctctgggatgtagtgggctgtgccagtcactaagtttggcatcaatatgatgaccttcagatgtggggtggtggtgactggggaccaccaggttgtctgaggaggtgtgaactggctcaggtctgaatggagtaggtcaaaactccgtggtggtcaatagttggattgtgcctgtgaatagccactgcgtcctagcttgagcaacatagtgagatcctgcctcttaaaaaataaataaataaataaatgaaacattatttggttatgagttgatttgaaatgcttgggaccagaagtgtttcaaatttggattattaaagatttctgaatatttacatatatataaaatgagatattttggggatgggacccaagtctaaacacaaaattcatttatgtttcatatacaccctataaacataggctgaaagtaattctatataatatttccaataattttgtgcacctgtcaaatgaggtcaggtgtagaattttccattggtgtcatttcagcactcaaaaagtttcatattttgcagtattttggatttggaatttttgaattagagatgcctaacctgtagttctttggtgattatagtttattagactggatgatctagaaattagccttacctatttggtagttagtaacctgaaattttctgaacactttctcttaattgcattatgttaactgggcttagtaaagttggcatgcaggttggtcatttattttactgtttcttattttgtggacttgatgggctggcgaaatgtatgtgcatagacatgaatgactgataaatagataaattatatattctaaaaatcccacaatgtaagatttgtatttgtatttgtattattttcttttttgaggcagagtctcactctgtcacccaggttggagtgcagtgtcctgatcttggctcactgcaacctctgtctcctaggttcaagcgattttcatgcctcagcctcccgagtagcaaggattacaagcgtgcgccaccatgcctggctaatttttgtacttttagtagacacagggtttttacatgttggccaggttggtctgaactcctgatctcaagctatctgcccaccttattctcccaaagtgctgagattacaggcgtgagccacagtgcccagccaagatttgtatttttaaaaaccttttatatttgttaaaatctaacactttatggacaaatttagttttagaaaagctggaaataaacaacttgctgggtatagattagccatttagagcattcattaatttccaaaaatcattttgcatcacggaggtccaaaggaaaaataggcaacaaactatattttaaaatccaatgaaaggcttgaagagtcccacgagctgagtgatttaagaggacaactgtgatattaacttacttctggcccttagatgaaatatttgcccttttagcatcaacataattctgtaaattattattaacaaatacgtagattttataattggaaagagcacagtattaagatcatttagttcatctcccttcaggcatgaatcctcctaccacctactaaaggcggtcacccaggatctgttgatttgaatcacttttgatcatggagaaatcactatcttccaaggcagccatgccttataattccacagaaaccttcctctgggtgactttgccccatgactgctgccttctgtcctctgaagttagatataatatagttaaaccttcttccatatgacaatccttcagcttcgtctgcctagatccttagcctctgggaatgttctctacctgtctctttcttctgcagttatgtctttaggttcctcttctaagattaagattttttccctttccccatcttttcccctttgtctagacttaatgtctctttaaaatgtgctattttaggaggctgtgcattctcctgatgaaaggcaagaacggcatcttgtattctttttattgtccttagtcacgtgaatgcaaaatgtctgagacaggtctcagtcaatttagaaagtttattttggcaaggttaaggatgtgcccctgacacagcctcaggaagtcctgagacatgtgcccaaggtggtcgggggtacagtttgcttttatatattttagagagacatgagacatcaatcaatatgtgtaagatgtacattggttcagtccagtaaggtgagacaattggaagtgggggcttccaggttagaagtataatagacaagagacaaaaggttgcattcttttgaggccatgatcagccttccactcaatagacagtttagtctggcccagtgaatctgcattttttgcataaacgatggagaagagaaagcaatcagatatgcatttgtctcaggtgagcctcagagggatgaatttgaatagaatggcaggcaggtttgccctaagctggtcccttcttgatgtttccctttagcttggtgattttgaagtctcaagatttattttcctttcacagccatctaacagtgaagcatggtttcactttacacttgaaccactatatccaccagatacaaactttgcctcaaacaccacactcactttacacaaacctgttgacatcacacctaagtcagcttttcttgagctcccatatgaacaaataaacattcctctgatctgcggatatcccgccaggaagggccggcttgggcagtgctggctcagctagcccgccaccgctaccattggatttcctctttctcctctgattttaagaagtgagaaaaaaaagcaattcctgttaattatgtagacaatgcaagggtctccaggctccatttcagcaagttggtttcatcaagatcacgaaaagatgcatgcgtccccgagaccagagaggagttagggaccccgacacggaggtggcatcaggtaaccctcaggagtgagggtggggaagagggcatggctgatgctgggaatgagcagcgcccgcggagggaaggccggcggtcctgcgccccggcgtggacgcgcgcgggagttcaggctggggaaatgggtcaccacgtgctacggaggcggggacagggccctcctccccttatttgtaaagagcgccggagcggatcgcggagtttcaccgcggacctgtcagagatacagaggttgtgggggcgggagacagaaagagagagagatccagagaccgagtcttacgttgacacgcagagagaaagacgcagagacagacaaacaaacagataggagaggtgagaggccagcgagtgcttccgattaacttgccaagctcagagaagatccggggagagggagggtcccctttaaacgcgcaatccccaggactccggaagagcccttttctgcagctccttggggactgcacgtctcacttctaagtttgcggcggagagaataaagcagaaagacaggaagaggaggtggagttctacagttagtgtggttttagtttttcctaagaagtggcgtggtttggggctttatatccgggaggagcatatgtacgcaaatcctggggcgtttgcaaacccggatccggggcgtctggccccatgcccggccgggcgtttgagggctactgccacgcagcgtttctggagcctgccggctggtgccctggtggcctttatctctgtccccctttgtcctctttatctcaggctctccaggaggccggggggcccactccgcctatcgctcccctcggctacgctgccacttcaatgccccgcaggtcgcgagctgctgttctttcgaaggcgtcggagaaccaggggcgtcccgcgccacctctgactcggagcagcgccgagcactgacgctcccgcccttgggcaaggacgccagtgcgcccgcgcgcgtccctctgcgcggcagcccgtcgcgggccctcaaggggaagcccaggccaggatggccccgggtcgcgcggtggccgggctcctgttgctggcggccgccggcctcggaggagtggcggaggggccagggctagccttcagcgaggatgtgctgagcgtgttcggcgcgaatctgagcctgtcggcggcgcagctccagcacttgctggagcagatgggagccgcctcccgcgtgggcgtcccggagcctggccagctgcacttcaaccaggtaaggccgccaggtccgggcagccctccgtactgtgggtgtccctagacttcactttgtatatgagccgtttttatttgggaaaagtgcaggagaaagaatcttgttatatttctcaagtagaaggcggtatctggtgacacttgcttttcactagacgaggctgaaggattaaaaggttaacgttgttaagggatttggcagccggaaactgcagttttacgcctgatgaactgagaggtccgactctggtgattttaacattttatagaaaactttatgaagtagttgagggtgtgacgccactttaacagatgctttttagataggaatgagttacttaaatcttgccagaaagataacggctcgcacacttcctacaaggttagcaaggaagattatcacatgccaccctggttaacagttgcccggtgcgtaaccagtgctatttgaaaacgagatataatgtagttctggctcctgtgtacattacatgaggcattcagggctgaaacaggggcggccttgagactaagattctaatttggtcatccagatggtggtagactaggcttatattgttagttccttgtcatatgtcaggtcaaatatttgattctagtatttatccaaaatgattaaaaaaattttttcagtaataaacagggtactactaggcatttggcaataccttgggtttaagaacaagcttcaaactacgtaggagcagttaaacatcatacctctttgtaaacataaaatcaaattattcctaattatttctataataaatactctgtgattgggtagttcttaaaattgttaagtagacaaagtgtagtttctgcatccttccaaaactgctctccgtcttttaaaactcagttaactcagtgctttgacttgttttcctttactcctgtcccactgacagctgatattggagggtagaatacggtattttccatatcgtttgtcatttttggacgatgttagtttgttacaagaagtttttggggtccaagatgtttgggaaatgctgcatattatactctgctcttggaaatttggcgtttcctaatgaatatgactttagattacagttagggaaactgtaatcaaataaattccatgttaataacattatacgtagattgatctttttgttagaaatatcttaccacaattaaagtatatggctcttaagaaaagtagaactttctgatgccatggcatgtcagaggtggtctctctttgatctagaagggttttgtggtccccttatgcatgttctttagtaaattgtctataattccagttctgggcatggtattttatctggggtaatatctgagaaatgatgtgttggaaaaatggaaatgcccacaaattatgctaatatttaagaaaataaagtgtttgctggctagttgcattcttttcttatcaaataggggaaacaactgagctgactccagtatttccaggtaggtatggtcacgtgcttggaaagaagtttagaggattgacttgaagctgcatatctgtagcccacacattgttttgacttgcatgacctccttatcttgcagtgtctggaggtgttgatgaattttaaaggggcaaaagacctccccacatcacctttgcaaagacattggaaaacatgcctaaattatttaggaaaattggttaagtgtaccagtaatacgattctctgtttattagcaggcaggatgtctcaataggtaaaattatatgtatcttgacacctgttttctcattctcatgtttgcatatttaactgccctcattatggcctctgtgggcatcaaaaagagacaggaagaagcccataattaccttggaaagaaaaggaagccaaggaaaatttaccacttaataagcctaacaaacatctctttgatgttcttgctttttttttgagactgagttttactcttgttgctcaggctggagtgcaatggcacgatctcagttcaccacaacctccccctctgggttcaagcaattctcctgcctcagccttccaggtagctgggattacaggcgtgtgccaccacaccgggctaatttgtatttttagtagagatgaggtttctccctgttggtcagtctggtctcaaactcccgacctcaggtgatccgccggcctcggtctcccaaagtgctgggattacaggcatgagccacggtaccttgcctgatgttctaaaaagtcctaatgatgacaataatcattggttaaatgatgacaaatgaaataccaatctaaaagaatccattgatttgctggtaagtgatggacttgagcccacaacattcatgtatgctccagtgtgaaaccacccaattctggagtaaaattttagggtcattaatgcttacataccctgaggaatacaacttcagtttcctcacagggtggaataaacaatgcacatgtctattgtgagacactggtttttggctttgaaaaaggctaagaagataaaatttgtttcaaggtccaggaatttattgaatcttctacaagatttagttttcaaataacattgttcttttggttgagggctgtgatatttattaggtcagcttttctcaggtaatagactaatgaactctggagatttgttagacaattttggaaggttttctaaatatttttcttcgtatccttaagtaaggactactaaattagcttgttgctttgggatatcaaagaggtcagagttcaaactgtagacagtagaacaattgagccaatagttttgcttcttatagctactgacagtgcgaagagttaggtagaagcagtgaccaaaacaacaaagaagagggagcccttttagccaaataggtctctggggccctcatttctggataaaggtctgatctattgaggggagttcctagaatacacagggaagccccaaatatctggatacccctgggttattaatctaggacatttaagaatggcctcagtgctgccttttgtttgttcagctgttcctttctcattcttcaaatgttccttttcctcatttcctctttcaaacactgtattttcaagttcttatgtgtagatagtggttaaacagcctgataaaaggaagatcctattttctaaattatcacactgagctgctggaaatgcctccattcagaatttcttcttctgatatatattttttgatatatatcttgcagcccatctcctgtagtgcacatagtttttttcttctcacatttctactggtaaccaagttctgtttttaacctttttcagttcatattcagtcttctcaaagcaacactctttcaaaaagcctccatgaactgtctcagctggcaaactctaaatcttgagcctagcatttaaggcctgatcctcctgtgtcaacctacctctccagacctagcacccactaaactaaactactcactgctctatggattcccataagcttttgctcaaccacttcttaactcattatcttccttggacctttcctgcctttgactgaaatgttcttcttttccttgaattgccctgtgaaaatctactctcttaagcccagttaaacttcaccataaaacctttctggggtatcacagccagcactgatttactgatttctctattttctgaattcctgaaatattttttaccatgctgatgtcacttctattcctgtgttcagcagacattttaaatgactgctgcactctaatttgaatggttatttaaaaatacaaatctgatcatatcattcatcctgttaaacaattcagtgacttttagataaactacaaacacttagagtggcttcaaagtccttttctgatttggtccctgtatgtttcttaaaccgtatcctttgtcacagttccaatcttaatggaccatttacactgcctggttctctagaaatacctgattatgctctggtatcagtttagacattacttcttctgagaagcctttcttgatcttctcaagagtgtagtcgaagtcccttcaatgcaatcctgtatttcttggtgcttgtgcaattataacatattatatattgcaattatattataacatgtaaattattttatatgtattacagttttctgcttatgtggctataacccctgctgcctctctctaccctccaaaagatttttaacaagttgaagggcatggtctgactcctctctctagagactagtgtagtgcctggtttataacatgtattcattataatttttttgaatagatgggtgaagatggtttaagatgagtttgataatttgagtcctcacatgactttacagtctattggaggagacatgacatatgcacatataattataatgcacgaaacagtgatatgcctgattaaggaactaacccatttatgcctgaggttgcaattttttgaatttttgcaatcagaccttggcaatgaccttgagcagtgggatataaataactcccacatgcttagtgtttcaataatggaacactaggaataaatgtgtttaaaaaccaatgtgagataagacctgtgttttcagaacattaatctgacatgagagtgtggaatgtattggagtgggtcaaggtgggagctaaggagccatctgcagtggatttcatgagatgtaaggaccacttgaatttggagaaactcagaaggtaatataaaggctctgccttcagagacttcaagaagagcaggcatggctgaagagtatgcaaaaggccccaaagataagccttttctatttcaatattttgcctgtaatcattatttatttaagtattgctagatctcttccttcattatcttctgaccctgtgatgccagaaggagaaagaataactccgggctcatattaatggatggccaggctagtggtatgtagcaaaaaggagtgtatgtatgtgtgtggatactgcaaacatgttttttgcattgcctgttgtcatctactgcactttttcctggggtgggggtaatgatgggttagatgagggtgtttctgggaagcactgactatggacagaagagataaagaacatttgttcttttttttttttcccctttatgtgctgagaaatggtgggggtaaaccttctaggaatgccttctaacctgcttgttcaggtgagaaactggaagggcaggacagagggtgaggttacctaggtctcttgttaagaatcctccaagacaatggccccattctgatctattagatcactctcacataagttgattgtgtacagtgtgttgattgtatttcaaggctttgggaaaatgagggacattcgtaattcatttgactgtgatgtcaagagcttagtttgccttgatgccaggtgtgattgggatccattaggaaaatgcttttcattcctttcatatctaactcccaaaatcacatctttacccactattctaggagtcatatgaacccttttatatgtaatgtaataattatagctaggatttattaatcttttactgtgtggcattactcccttaaccaatttatttgtattatcatgtttcatactcataccaactctatgataaaggtcccattattatcttcattttatgtgtaagaaaaatgtggcacagagaggttaagtaactggaccaacgtcacgaagtaagtggtagaacctcaggcagtcttacacactatgctatagtgcattttttgaattacaatctagaaaaccatactttctctagctagagcaaccatgaccttagattttgaactacagggagaagttactagtcatcgactgcctatctggttacattgcttagtcacattaaggaaatggtactagagctgtggaggctacgatgatgatgacttgtctttgtcctcagagaccttataattaagaaataagatggaggctgggcgcggtggctaacgcctgtaatcccagcactttgggaggctgaggggggcagatcacaaggtcaggagatcgagaccatcctggttaacatggtgaaaccccatctctactaaaaatacaaaaaattagccgggagtagtggtgggtgcctgtagtcccagctactcaggaggctgaggcaggagaatggcgtgaacccgggaggcagagcttgcagtgagccgagatggcgccactgcactccagcctgggtgacaaagtaagactccgtctcgaaaaaaaaaaaaaaaaagaaataagatggaaactgtgaaaagtgactatggaaggcaaagctgcagtaatcacgaaagcagacattgtaaaacatatcacaaggccatatatgattgtcacatggatactagaaaacatctgctactagtttagaaaggtgagggattttttggggttggaaatgcctcatggaaaagttataactcagtcaatttggcttatctggtttggtttttaaaaaatttattgattgaactcttgcttataccaaatgtgatgaattttcatgtgaattacatgaattcttttttagaggatgaaattttcttttattgtttcatatataatgaatttttttaagggactatattttgagcaacaatagtactttcttctatggatagacttcaggcatgtctagtatgaaacctttcagttcatttctcacttttatgctagaagttttcggccaatgaatccactgtctcttctggcggtttagaatggaaatcttcccttatgatgcctctgaagcaattgcattcttaactgcacaacactggagaaagtggtttgtgcataggtgttggggaatgagttgaagcaaggagggaagagtaggtgagccgagccaagtacttcaacagaatcactgactcttaactataggtaagacagtgctgctaggaggcagtttgagctttctcacacagttatcaggtgaactttccataattgggatagatctttctctctagggatgttccctagggttgttctctcatctgggtgggagatttgcagctgttatgctttccatgatttattcttatcttgggatatattgaggggcagggacttagttttctgctttctagtcataaaaacctattacttttcaaccataataattgtttaaaggtgttttctttaaatttaatatacttttgattctttttttttttttttgagaaaagtgaattccttttggtggtagtagggattgggggagaaaaataggaatataaatagaaatggaaaataaggcctgaagttgagaaggatcagtgatcctcaggaaaagaaaagcaacatctaatgaaggcaatttaatgtggctggtaatgggtttgcaagttacttgtattccaagtggtgtttcctcaagggatgtacacattactaagtgcaaacagctagtattagggtcatttacaatgcaatttattttaaaaaaagaatgttactaaactctaggctatctaaaaaactaggtaattttcagaattttcccatttccaactttatataacagtagattcctgtttgtaatcaaaactaattaatttattctcaaattattcccaattgtctgtttcagtagccttgagatttattttataaagaaatgaacctttcatcgaattacctttgtgttgataggatttgggagcatagaaaacattcagaatggagccttgtttaatttggcttccgtctctttctaaagatactctgttgtttttcctggcctgaagtttaaggagaataaaaacaaaaatctgttgagtctagattaaaggtgaacctgaaatgtagcattatgccctccaaggccaaatatttaacaccttgactttttttctttaaataactaattgaatagctagagaaaaaaatcaagtgagcattgataatgcctctaagtctttagttctttgaacctaattaaaaaataaaccataattgtaaccaatttatttggtgagcttcttagacctctaactatcttagagaatacagcataatggtttacaatctggcttctggagtcaggcaagcttgcgctgaaattctaattctcttgtttaccacctgggaaatcacagccaagtgacttaccctctttttgtaatccttagttttcacatccgtaaattgagaaaaaaagagccttactcataggacagttttttggactagaaaataagaacaatattaacatttattgagcatttaacatatttcgggcacttatatattcagtatgttatacgtgccaactcaataaagatataagacttttttccattacctatattgcttccaataatacgtaatacaaaagacaatgtatgtaaaatacttagcattgggcctggctcaaattatgtgctcaatgcatagttattatcatcataatagtatgttactcgatatagctacattatccttaacaaaattgtcttccattgatgatctgaacacccaagcgtctgtcaactaaaagaagaaagcacagccatgaaaagacagcaagaattaatgaaaaaaaagatcagtgagaaataagtcagtccagtgcctttgatttcagtcttggtttccatggtgactcaccttcagagaggcttttacagtttacctccacttccctttctccaaacactggtagtaaattcttgaaaatgtaaaccttaggagtagagactaataaaataatttgagtacttcaatgtgcattgaaattattacctcccttccagaggacttctgatgctacatttagaagttggctttattttattatttttgccccagattggcatcaccactgaaatgtgaatgtttggggaaccatataatacttccagaaatggatagaattgcggttttaaattgagatctacttctaaatctgtatggacctctatatgggttttgcaagccgaagaatccaggaccctctgcatttagctgaaccctgttggatagaaaacagataagagaatgagcattattttagtctaactggaagaagtgagagatgtatctcttcagcgacagggaaacagaaagttagcccgaacttcagcgaacagtaaaatcagtacaccgattctgagcttggcaaaagttcctgctttatataaatattcatcatatgttctataaaacatgcagtcccttatgttaagagatgcatgctatgatggtaccaggtaatagagtttgaatgttaaatcataatgctctacagttttcttcaggagcagagttccccagaacgtaagtatattattcggttacttcacctacacattagcatgaacagctagacactggctctgtctctagtcttgggatgaacgctgtttaagtaaatgttgtgggtagggcctttactgtggcagaggaaacaggtcctgtcctagtaagaatatttactaacaattacggagcacttcttgtgttccaggcatcctgctcagttcttctttatacaccattctgttaaacctcctgatcccatggagtaaacactcttgttattcccttgaggaaactcaaccttaggtaggttaagtaactcactttaaatcagatgactcatattggcagagcacatattccattccagggtgactggattctataaccgatgcactttccactattgcctctcatgctgaagagtatcatcccacagaaggacttattttccaaaaagccaagtgcctcttgtgtcatccaagtgcctgaatgtcaaggtagaactaatgccattttcttgaagccactgggaactgtacaatcatttatttgaagctggcatatgttctctgctgatgttcccctcttgtttgagtgaaaagagggaaaaaatgtcttttcttccccttgttaaagttgtacttgcaataatcagggccggccctaaaactcattattacttcctctacaaactagtttttaaccttgcaaagttatttcctgacaattaacatttgatactcgaaacaatattgtgagaaaattgggacatatcagttcccccagaaactgagatacgaataagtcatttggtaaaagttagacaaagtccccagatttttctgggagaccagacattccaattttgaatcctcagttctttttccttgggctaactttaatcagatgctgtattagcaaggccacggtgctctgactaacctgaatattccatgatctttgtgtttcatttactgtgtataactggaccatagaaaggtgcgaatgcctgttctgttttctcacctctcagtcactattcaaaccattggttctggcttttttctgtccccaccacttccctgaaatttataccaagtcacatggaaccaccttattgttaggttcagtgggtgcttctcaggcctcaccgctctgataattttgttggtgttgattacatcctacctgaaacacattctttccttgcttgcagctgtttgtgccatgtttttcttacttctctggctgctgcttttcaattttgatttcctttgctcattctttaaatattagtgctcctcaggtttccatctcgagcctgttttattttgatgtcacacactctttctgtatatcttcaaggactcatatggctgtgattatctatctgtagatgctttctacatgagttggcttacttcagatttctctcttgagattcagccttgcgcacccagctgacaattgatgtctaactcttttcttttccccaactcaacaggtctaaacctgtctcaaacaaaactcatcaactccatctctttctccatcaaaaccttttggtattcctgttttgcccatcttagtgataggtattactatctgctcactgaactaagctgtgaaactggatgttaatattgactcctcactttttctttccccttcccatatcaaatgcacataagtcttgtcataataacttataaatatctcttagttaatctcttgaagctccaacatcctctttgtgtaatggggaaaattgtacctaccttatgggattgtagtagagatgaaatcagataatatgtctagccactctgtcttttgcctggcatgctgtaagtattcaatacacatacactctgttactgctgccgccctctgcatccagtcttgcctcacatatctctttcctctacatttcttccagtcttgaatacatatatatgtatatatatacacattttattattttattagacttcaagttctgggatacatgtgcagaacatgcaggtttgttacttaggtatacgcgtgacatggtggtttactgcacccatcagccattatctacattaggtatttctcctaatgctatacctcccctagccccgcagcccctgacagaccccagtgtgtgatgttcccctccctgtgtccatgtgttctcattgttcaattcccacttatgagtgagaacatgcggtgtttggttttctgttgctgtgttagtttgctgaggatgatggtttccagcttcatccatgtctctaaaaatgacatgaactcatcctttttttatggctgcatggtattccatggtgtatatgtgccacattttctttatacaatccatcattgatgggcatttgggttggttccaagtctttgctactgtgaaagtgctgcaataaacatatgtgttcatgtgtctttaaagtagagtgatttataatcctttgggtatatacccagtaatgggactgcaaaccatcaattggtatttctggttctagatccttgaggaattgccacactgtctttcccaatggttgaactaatttatactcccaccaacagtgtaaaagctttcccatttctccacatcctctccagcatctgttgttccctgaccttttactgatcgccattctaactggcatgagatggtatatcagtgtggttttgatttgcatttctctaacaatcagtggatgatgagctttttttcatatgtttcttggccaaataaatgtcttcttttgaaaagtgttcttatcctttgcccagtttttggtggggttgtttgtttttgttcttgtaaatttgtttcagttccttatagattctggatattagccctttgtcagatggatagattacgaaattttcacccattctgtaggttgcctgttcactttgatgatagcttcttttgctgtgcagaagctctttagtttaattagatcccatttgtcaattttggcttttgttgccattgcttttggtgttttagtcatgaagtctttgcccatgtctatgtcctgaatggtattgcctaggttttcttctagggtttttatggttttaggtcttatgttcaaatcttcaatttattttcagttaatttttgtataaggtgtaaggaagggatccagtttcagttttctacatagggctagtcagttttcccaacaccatttattaaataggaaattctttccccattgcttgtttttgtgaggtttgtcaaagatcagatggttgtagatgtctggcgttatttctgaggcctctgttctgttccattggtctatatatctgttgtggtaccagtactatgctgtttttgttactgtagccttgtactatagtttgaagtcaggtagcgtgatgcctccagctttgttctttttccttaggtttgtcttggctttatgggctcttgtttggttccatatgaaatttaaagtagttttttccaattctgtgaagaaagtaaatggcagcttgatggggatagcattgaatctataaattacgttgggcagtatggccgttttcatgatattgattcttcctatccatgaacatggaatgtttttcatttgtttgtgtcctctcttattttgttgagcagtggtttgtagttctcctagaagaggtccttcacatcccttttaagctgtattcctaggtattttattctctttgtagcaattgtgaatgggagttcactcacgatttggctctcatctgttattggtgtataggaatgcttgtgattttagcacatcaattctgtatcctgagactgctgagttgcttatcagcctaaggagattttgggctgagacgatggggttttctaaatatacaatcatgtcatctgcaaacgagacaatttgactgcttcttttcctgtttgaatacccttcatttctttctcttgcctgattgccctggccagaacttccagtactatgttgaataggagtggtaatagagggcatccttgtcttgtgctggttttcaaagggactgcttccagcttttgcccattcagtatgatattggctgtgggcttgtcataagcagctcttattattttgagatacatcccatcaatacgtagtttattgagcgtttttagcatgaagtggtgttgaatcttatcaaaagccttttctgcatctattgagataatcatgtggtttttgtcattggttctgtttatgtgatggattacgtttattgatttgcatatgttgaaccagcactgcattccagggatgaaactgacttgatcataatggataagctttttgatgtgctgctggaattggtttgccagtattttattgaggagttttgcatccatgttcatcagggatattgacctgaaattttctttttctgttatgtctttgccaggttttggtatcaggatgatgctgacctcgtaaaatgagttagggaagagtctctctttttctactgtttgggatagtatcagaaggaatggtaccagctcctctgtatccgtgaataccgatacagagctgtgaatccatccagtcctggactttttttgattggtaggctattaattactgcctccatttcagaacttgttattggtctattcagggattaaacttcttcctggtttagtcctgggagggtgtatgtgtccaggaatttacctatttcttctttattttcaagtttatttgcgttgaggtgtttatagtattctctgatggtagtttgaatttctgtgggataagtggtaatttcccctttatcatttttaatatgtccttttgattcttctctcttttcttctttatttgtctagctaacaatctatctattttgttaatcttttcaaaaaaaccagctcctggattcagagattttttgaagggtttttttgtgcctctgtctccttcagttctgctctgatcttagttatttcttgtcttctgccagcttttgaatttgtttgctcttgcttctctagttcttttaattgtgatgttatggtgttgattttagatctttttcgctttctcctgtggatacttaatgctataaatttccttctaaacactgctttagctgtgtcccagagattctggtatgttgtgtctttgttcttaaagaaattacttatttctgcgttaatttcgttattacccagtaatcagtcaggagcaggttgttcagtttccatgtagttgtgtggttttgagtgagtatcttaatcctgagttctaatttgattgcactgagctgggagagacagtttgttatgattaccattcttttgcatttactgaggagtgttttacttccaattatgtggtcaattttagaataagtgcgatgtggtgctgagaagaatgtatattctgttgatttggggtggagagttctgtaaatgtctattaactcagcttggtccagagctgagttcacagacttgaatctttttttttttttttttttgagacagattcttgctctctcccccaggctggattgcagtggcactatctcagctcactgcaacctccatcttccaggttcaagcaattctcctgtctcagcttccgaaatagctgggactacaggcgcccaccaccatgcccagctaatttttgtatttttagtagagacagggtttcaccatattggtcaggctggtcttgaactcttgacatcaggtgatccgcctgccgtggcctcccaaagtgctgagaatacaggcatgagccactgtgcccagccaacttgaatctttaatatgcaaatctgagcatgtcactatcctcacatgacttcccattattgtgaaaataaactctaaactatttgcctggtatttacggcagaagcatctgcccccactcccatatttctccagccttatttctactttttccttcacatttcaccttcagtgctgctttctccaggaaggctttgacagtcccattacttcagagttggctaatacctctgtcttctccaaattcatggagcctacctccacacttaccagactatgctacagttatatatgtcttttttttttttttttgagattcagtctctctctgtcacccaagctggagtgcagtggtgcagtcttggctcactgcaagctccgcctcccgggttcacaccattctcctgcctcagcctcccgagtagctgggactacaggcgcccaccaccaagcccagctaatttttttgtatttttttagtagagacggggtttcaccgtgttaaccaggatggtctcgatctcctgacctcgtgatcctcccaccttggtctcccaaagtgctgggattacaggcgtgagccaccgtgcccggcccctgcagttatatatgccttaatatggactctgcaatagtctgtatggtccatgaggcaaaggactgggtttacctggaaagcctccgctatgcccataactagcataatgtctgacatttaggcgatattcaagaaatatttgttgaatgaatgaaatacttgataaataacttcaacctttttaactgataaatttttaaatgattaattttaaaccaacataaccttctaaattaatattcctttccctcctcatcatcctctaaaaggacacatgaactctctattctgctggtttaagcagatgatctagacatcaacctagatgcatcatttaatttaatttaaggtaaaccagcaattccattttttgttgccgacaatgaattaaaaaaaaaaaaacagagagataaggcctgagaagcacccattgtatttagcaatagggaggttccagtgaccttgtatagaataatttcaaggaagtggtgggaatagaagccagaccacaatgggttgaggaatgactgagaggtgaggaaatggaataggtattcatgcatttccatgggtccaattacacacataaaaaacctaaaagaatagtacattaaaatttaacccatgggccatctaaatagaaggaaataaagtttttattacttttagtttatgaactttccaggaatttttttcttctcatttagcctgggattttctctgtagcccattactatattctttacggcaacttagaaacactgatatcaggattagtttatttgtagcatcagggccacattaaactgattctaggaaagtttcatagaatgagaagaaaaacttatggctggaatatttgcctcctcagaggtcttggtagatgattcccaggttattgatttatatttctcagaattatattcaaacacagtgtgctagtttgaaatctcctttcattcaccttctttccttaatctacaaaattagcaattgtttataaattgagtgtcttatgtgtccaaggacttattaggggttgaagaagatataaaaaggaagaagtccattctctgtagatttttatgatcttattgaaggaatatccatttcatgagaagataataatacatggaagcacacattaagtgctaaacaaatagataacagggatgtctggagtctggagaagggatgggtatagcaatattaggcagtgaagatggattccaaatgggccttgcaggacagacaggagttgggtagtttgagaggagatgtatcatattctaggcaggggtcatgggagatgcaaagtcacagtgaagttacaatataaggctgattataactggttaggatagagtattcatctatccttttacagcatgctgaagggggaaggaatattagagacaggcaagtgaggttcttaagtgttaggactttagactctcggcataaatgtgtacaatttttttgagacagggtctcactgtgtcacccaggctggattgcagtggcacgatcatgactcactgcagccttgacctcctgggctcaagcgatcctcctgctcatccttctgagtaactgggactactggtgtgcaccatcatgcttagctaatttttaattatttttgtcattcaagctggttttgaactcctgggcttaagtgatcctcctgccttggtgtctcaaagtgctaggattacaagtgtgagccaccatgccaggccagaaatgtgtaattttgaaggtttttgtttttgtttttttggtatgtgtgtgtgcaagggttgcagtttgggcagaagaaggacatgctgatgggtgatgcatcagtagaaacaaccttgtggagttgtaggataaccaggatgagaagggtattggatacgattaggttagaagctcctagctcctcagtgaagtggtacataagggctctctctgctggtgtgtcatttttatctgctagattctcaaacattttggtctcaggacccccttgtactcttaaaaattattgagaataccaaagagccttaatatatgtgatttatatctattaatacttaccattatagaaattaatgttaagaaaacttgaaaatatttaatttattaaacataacaataaacccattccatgctaattttattttttatttttttgagacggagtcttgctctgtcgcccaggctggaatgcagtggcgcgatctcggctcactgcaagctctgcctcctgggtgcaccccattctcagacctcagcctcccgagtagctgggactacaggcgcccgccacgaggcctggctaattttttgtagttttagtagagacggggtttcaccgtgttagccaggatggtctcgatctcctgaccttgtgatctgcccgcctcggcctcccaaagtgctgggattacaggcgtgagccaccgcacccggccaaggtgcactcatttcttgtggcaactccccagccctgagttgaagaagcagcatgccctccacactttatcctcagaaggactgagtgggaaacccttggtgtacatcaaggaaacaaaggcttttgatcttggcaaaatgggataatgcccatgggattccctagcagatgatgggaagtagggtggcctctgccccctgaagacatgtcaggggtgggaagcgaaggatctagattgggtgtctgtgctctgacaccacaccacacttttaggagtctaaaagaacaccttctcttttcaagacaagacctcgaaaagctgaatatggaatggggtagggctgggaaacttgtccatcactatgacaaagacagaaaatgttgtaaacctcttttaaaaagattgttgtagctttcaacattctttctttttctttagtaaaatctctaagaattccagcctgccttttgtttaggggaacctggaaaaagagattttaaacaaacaaaacatgacttaattttatttttcttaaaagaaactgaaatacaagtacattgttaaaaactttggcagatataaagaagcagaaaggaaaaaaaataaaaccacacataattttaccactcagagataaacactgttaacatttggagcacagatttatccttatttatagcagcattctctatatattgtttcataataatctttttatccctagcagtgcatcataaaacaaggcatctttatcctttaaattgtatattcaggaaaagcgttcttcatcttcccttcaaaaagagttttgagagtgaacgtaagtgtgtgtgtatgtatgtgtatgcatgtgagtgtgtgtgtatatgagtgtgagtgtgcatgtatgtgagagtgcatgtgtgttggtggcatcagtgccagagtgacttcagtaagaagtgtaagaaaacctgaggaaaaatggaaaaattaatcttggggaaacagagttggggtcacttgactggccacctcttaaacctagagattatttttatagagtgttcttggcttaaaccttagaaaactgtcttttatcttgatagaataataatgagtaaactttgaagaggactttaaagaggggaaaacttcaagagaaggtggagagagagattcagcgtgtgtatatatgtatacatatatatatgtatatataagtatgtatgtatatatcagggagatttggaagtgaaacttgagtgccttgtaattgaggcagtttcattattgcaggaagaacaaatctggaagcaatttcctcagtcactcgtgctttgaatgttcctgctgtgagtgtggaacatgtaagtcaccaattccattgttcagtgagccctaaaaggataaattaatgggacggttcacttgtttcaagggtcagaagtggtctcccaattgttaaattcaaactaccattttaaatgtatgtatttcaattgctctcttgggatctttggccagttgccatattcaaaacacttttaggtatcccaatgattatttaatgggaaagaaacctctggaatcctggaattcatatctactttagtatttattaagatgattactaatattgctatgtacctggcatgcagtagtgctcggtaaatatgtgttgaatgtatgaatgagtaaataaatgaatgaatctctcacttgtcttcacagcatttttggagccaactgcaaaaatggtttaagttcatagctgcaaactaaacaaaattatgaaaaagcaaaagaaatgaagtgcagaaagcgaagtatacctaaaattctcactctggtgagaaaagttggctgatgtttgaactgtaggatttttttttttctttcttgagccggagtcttggtttgtcaccaggctggagtgtagtggcactatctcggctcactgcagcctccgccttctgggttcaagcgattctcctgcctcagccttccgagtagctgggattacaggcatgcaccaacacgctcaggtaatttttatatttttagtatagacggggtttcaccatgttggccaggatggtcttgatctcttgacctcatgatctgcccgcctcggcctcccaaagtgctgggattacaggtgtgagccactgcagctggccggacttttttatttgtataaatgtaagtacaagggcagttttgttacatgaatatattgggtagtggtgaaatctgggcttttagtgtagccatcacctgaataatacatattgtgtccattaagtaatttcttattgtagggttatttttgaagtctgtctctgagtgggatcctaaatatggtttaacagttaatttaattgtgtgtttcaactcactattaggggcaacaaagtgcattctctgccagggtctcaatgattctttcattgaatccttctcagtgttggaccaagacatagcagccagaatactggcttacaagtcaaaaggcatgagaacacatatatctgaattctgtctttaacacttttacattgtttaatcttgtaccgttagaaatttacctttctagacaggatttcttcatccaaatttaacctaaaatctatttaagtggttgattaaagaggttatacgtgttaagcatatattatggtttgctattactgtagtccttatatgcttcccagaactcttatgataactattgcttataaaatttattcaccaactaattgcatactcatttgcgttactgatctctccattaatttttttgtgtatcatgtcttatttccccaagaatcagatgcatcaaaataacaaacttagcacatgtatctcctcctctaggaagccttccctgacctcattcctttaatcacatgatatgttgtgcatatttttatttgcttatctgttttatatgtatctcctttctatgctgaatgatgagattgttgaagatgaaaaccatgtcttattctcaacacctactggaatacctgactcagagaaggtgtgagcaacctgttcagttaatgaataaatgaatgagaatgaaggagaagtggaatgggcttctataagagcagaacagatgaagattataggtggattcttattaaacctcttacttgttgcatctctttaaagaacaggagatcgccacttacttggggtgggggaaggatgggtttcatggctttcatcacagctgcatacatggcaaatttcagaaagtagctgtagttcttactgaatagcaacagctgtagcaatcactggcagggcagcgcagggtagaggtgactaaaataaaagaagctagacagagctctttcagacttggattctaaccccagttctgctgcttgctccctctggggctttgtaatggtatttaaagttgattgtcattgagtctaaatgcattacaaaaatctgtgtctccctgcctttacctccacagagagaatacaaccacacctagcactttccttattgggaatgtgagctactcagcctcccacagaatctcaatctattgcaaaacaaaatctgaaaccatttctggggtggcttttgaatgggatgatatttcatttctggtgtgatgtgaaggccttggtataatggtacaggatcagatggtcttactgtattgtattatttaatgggtgccacttgataagacaaccaagcagacaaaacagcctgtgtgtggagaacaggaagaagtgtggaagctttaaagagtggaaaggcttatctttttgttttcctataggttatgatgtagcattcattcactagcttttaaaagtgacttttaaataattactttatgtatccatcagtactcttttatttgtaagagtgaaaaaaaatcaactttaattagcttaagccgaaagggaattcattggcccacataacttaagagtcagggtgcacatcagctttaggtacagcttatccagggtattgtgatggtattgaaaatctgtctttctccacttcttagttagccttctttcacatggcggcagaaatggtttaagatgtccccagactcacagcaggactagtggagaaagagtttttcagtagcacaggtgattataggatccagactgctcctatgcttaccaaaatcacatggaaggcagttcccatggcagtaaggaggtctgttactagatgatgggacaaaaacccaagggttacatgtctttcatcattccaggaaggcaaaaaccacagacatctaccaaatttgactggtctggattgtttcttatgttttgagcttaattcactcgggcttatatactggctctttttcgtgcttttgcacaaatcgtgtatgcattctcaagcctttgttcttctttctatatgctgattctcctgatcagctccactactcccactcagctatgacctcattgcagaagaagccacatccttgtctctggtctctacctttctcagggaaagctcaccaatcatttgcatttggggtcccaggagcattgcaacttgaaatgtctaaaaccaaagttgccaccatcctgccaaatgggcttctcttcctaggttccctaatcacagtgttgcagaactttgttccttagttcagcttatactgggttcttgtcacacgaccagaaaaaattaggcacatagacacattgaagggtgaggagaatggaatttattgggcgaaaaggaaaaaagaaaaaaacgacctctcagcaaagctagcggagttcctgctaacaggcccccatctcacagattggttccaggtcacaaacacaggaactgaagagggcaggctcctgccccttgcacgcacgggaaattcccatggctccatcctattctcccactgctcaggcaggtagagattctccgaggaccctcccttttatctgcctcctgcatctatcaacagcagtagcagcatcctctttctactctcccagcattctatcgtcaatgttgtttttgactatttcctctgcatatcatttctccctcatgtgaactctcatagttctttattattatgttttttgtgaatttataatttcctctctggttttatagaccttcatgtatctaatttatttctgccacagtgatttaagtttgctgatggaaggcagttttacttatttatctttgtactatttccttcctggttgtcatcctccagctttccccactttctacttctcccatcaatattatacctagacttttatggtttgataaatatttgtagaataaaggaaggagttaatgcaatctgtagtataactacatggctactatacttgatattgttaaaaaaccagtgcctaacagcagtcgaagtggtaaaaacagatttcattcaggaaacattgcaataggggtatgttagagttctccagagaaacaaaaccaacaggatatatatatatatattttttctcatatatatattctcatatatatatactctcatatatatattctcatatatatatactctcatatatatattctcatatatatatactctcatatatatattctcatatatatatactctcatatatatattctcatatatatatactctcatatatatattctcatatatatatactctcatatatatattctcatatatatatactctcatatatatattctcatatatatatactctcatatatatattctcatatatatatactctcatatatatattctcatatatatatactctcatatatatattctcatatgtatatatactctcatatatatattctcatatatatatattctcatatatatattctcatatatatatactcatatatatattctcatatatatatactcatatatatattctcatatatatatactcatatatacattctcatatatatatactcatatatatattctcatatatatactcatatataatattctcatatatatactcatatatatattctcatatatatatactcatacatatatacatatatatatacatatatatatacatatatatatatatatatatatgtatatatatatgagagattatgaggaattggctcatgtgattgtggaggctgagaagtcccaggatctgctgtctgcaggctacagattgggaaagccaatgctttaatttagcctgtgtctgaaagcccgagaaccagaggagccagtggtgtaaactctagagggagggttgaagaaactgaaatcaaatgacccagttcaagcagtgaggaaggaaaaaagggacaaattccttcctctgccttttgttctgttcagaccttcaatgggttggactcacactggggagggcaatctacttaacggagtccaccgattcaaatgctaatctcatctggaaccaccctgcagacacctcagaagtaatgtttaacgccctagaaataatgtttaatttgggaagccagtggccagtcaaattgacacaaaattaatgatcacaaggggaaaagagacctcagtatggaacttggctcaactccaaatacaacatggacaagtagggatttacagccaaggaggagcaggggtaggagtggggagggggtcagtgaatggaaaattactaagaggaaacattaagggtaggggggattttggttaaacagacctaacaggattcttgctgaaggcaggaccagggtggtcagacatggagggtgagggaactctctttaaactgagttagaaggtttcttgctaacaccaggtgatgcaggtcctgtaaggatggatgctagggtcgaggcctgggctcagaggagcctgactgcagtttagtcaaggagagaatctttgtcagtattgaagctttcagattcagcatttattataaccagatctcaattgtgtaaaatgctaaggaaggaacttgccctaattccttgagcttccttcatcctctctctgaaccagccccccactttcccataaggacatgtttaggaaagaggcagaaaaacttctgactcataaaaactggtgaggaagaaggaagagcagaagcggaagccaaaatgcacataactatttgctgaaacggttttgagcatactttgcggtctcttttgtaatatatacctagcccctacctataatgctaccttactttggtgtttcacacatacaaggcccatttgaggtcaccctaatgtggcaagagaccagtgaataggagcttaacttcaaacttagagtctttatgaaaaatgtcaacgcgctgaacacgaggacatctgaaaccttaaaaggccacagcaaacatcagggcagcatgcttgagaacagcagtgtcatagatacaagcatgaaaagaagtaaagctgtcataaatgtgaaggagctggcgaaagcacatggagttttattaaggcagatagcattccgtacaatcatcctgaatagttttctgagtagcacttgatgatcctaccctttccgtaatttgtttgttcattgttttggaggtgaaagggtgtgcttgtgagggtgtttgagcctccttgtccatggtataaccggttggttttgttgccctcactcttcaggcgctggactctcatcctgtttgttcccactctgggaggcaccaccctttctaagacaactgctttcttttgtttctggttcaactttgttaagtcaaagtataataaatatcaagattgtttgaagccagaaataggccactgtccaaaattgtgttcattccacttgctggtagatagctattttaaataagtcaggcttgccattaattcagttctgctgcactgttcgtattctgttctcattctcttatcatgaggggagctttgagttttatcatctctacatctctgtgttcttcgtggtgattggacagttgccactctccatgactaccgtgactatccctgaccacctgtccagctaaaatttcaacacaaatgctgcacagctaagctatctgatggtattaattatatatttatttgactgcactgtttctttttttctaattgtatgtaggagggtgtctttaatgatgtacagttggcaattctgacatccttaagggtggtggcattcaagctcgtgactgccattcacagcaagaaatacattttacatcatgatccagtatacatgttcatgttatatatgatgtgtaactaaagtttggttaagcaacacttaccctattatgtgtgatatggtctatagtttctattattttgtattttacttcattaaaaaatgcagactgtgccttagcaagtgggcgtcctgattcaggaatgggttacaatttgagtctgaaaaagaactgcttaacagtcatcaggtattagggagccttagcatgctaattctgaaaagtctttggagattatctataggcatcttcccgttttcctcctattttacagttggaggaatttaaagtccaagtagggtaagtcttccttgcagggaaacagtggtgctctctgtgtgtgctatcatgtgctatcacacctatttattcctggaagcacacagtgtccagttgaaccacaagggctgtctactttttgaatctagcaattatgcttctggatgccttcctggtgatgaataaactgttcacactttcccttccccaattaaatcttgaggtattttctccctccattagtttattatacatcattctgagctaaagggaagactgttaacagggcattgagtgtggtgtatcctcttctatggatggcatgcagctatcattaatcataaactcaaaacagtgggttgaataaggaacaattttaggtacatacttagacattaaaaaaatctaaatgtgcattttctgtaaggtagttgtaatcttagcgttggacaactgcatagatcttggtgtatttgattatttgatgttttttcatttttcctttataaacagtagtgatctccttgtaacaaaatatgacattttaaatttcattgtttctgtagtaaagggaattacagcatcttatggtcaaacaattaacatcaactttgagttattgataccattcatagtgtattagtcagctcaggctgccataacaaaataccaaagcctaggtggcttaagcaacagaaatttattttctcatagttggagacttgaagtccagaccaaggtgccagaatggttgctgtctgtgagggctctctccttgggtcacagagagcattttctcgcttcctcatatagcagagaaagagcaagtgagcaggctctttgatgtctctttttataagtgcactaatcccactggaccagggccccaacttcatgaactcatctaaacttaattacctctcaaaggccccatctccaaataccatcacactggggattagggcttcaacatgtgaatctggggagacataattcagatcatagtacatagctaaggtcttattggggtttaagcattggctgaagcatgcaaataacttgcctaaattacgtttattaaagacagactcttccatttgagtgaatggatatttttcacactataattcttatgacattcagtagcatttattttatatttttcttaataatgcaagtactgtatatggaagagcttacagttaaaatgtgagaacaacattatacctttaaaaaattatttttgcagtttttttcctaatgtagattctagtccttgttaatagttaatgaatttctaaacagcccagcactattttcaaaacttaatatagaaaagttacccaacgtcattgagaataatgcatattttaatgaaaaacagtttgtgcaaaagacatattttaaaacaactttttatatttatatttattgcagtgtagagaagagaggaatttcttagcatgaaactgtagggagccaggtatttgtctacaagaaatgctatagagagccatgccagtgacacacacaaaatatccattcaaactgaagaaaagtaaactaagagggggtactgacaataaaaaattgttttaaaaccctttgtttgaatggtgttggtgcacccctattttaaataaagtccttagatatgcccaaaccaattcttatttattttctgctgtaggaaagctgttgattaagaagggatttttttttttctatttttcttgtttctaggtttaaactggtgtgggctgttttacaactttaggggcctttcaatttctgtggtgggcttttgtataaagagtgctgtgcatctagatgaaatagtctgtgtctctttatagcatctttgcttatgtgcttttacacattattatcacattttttttttgtttattctatttcagtgtttaactgctgaagagatcttttcccttcatggcttttcaaatgctacccaaataaccagctccaaattctctgtcatctgtccagcagtcttacagcaattgaactttcacccatgtgaggatcggcccaagcacaaaacaagaccaagtcattcagaaggtatattagaagcattttttctcttttatttgaaaagtctatgaaccattgtgaaatgaagttaatatgcctctttttctgctttattgcttttaattaatctacatagaacttcttcgaataatacttatattttgaaagtatttggaataagaagaattataactcatttaagcttcataagttatgctcttctctttgttgaatcaaaattacatttagtacacttaaaaactttataaaatccagttcttgattttaaacaatatatattttatgctgtgcatattggattgcattttctttggcttataattgatcatttcatttccattatcttttgcttaccatattattttaaagcttgtcagtttatctgcagttaccaatgaagagataagagaactagcatgcttctagattaaattttcagggaccaaattattagttttaattttcataggtgaaagaaaataccagagactattttaagtgactataatggtatttccatgaatatgtactttaacggtatgatctgatgcaaagaaattttaaaccataataaaatatatgtatgcttaatatacagctcacatgcttaaatgtgtagaagggtcactttcaccaatgagataaaccaattgttcagggagtctgtttgaaaattatgttggaattttaaagtttcgttcatttgttcattaagcaaatatttattgaacgacataccaagtattgttctgtgcactaaggagtcaatggtaaacaagaagaataattatctgtctttttagggcttacagtgtagtggagaagatttaaacaagcaaatttaaacaagcaaataaacaacatagtttcagagtgaaaggtgctatgaagaaaataaaatattagtaggtgagggatagaaggtgatagtgggtgagtgtcatcttagatagatcaaggaagccctctctgatgaggtatcatctgagcagaaggagagggccacagcaaggtcgtctctagtgaagagcattcttgattgagggcacagccaacatagcttggcaatgagcttggcatgagtgaggagcagcaagaggctcctatgtgtctggagcctagtgagttggtggggaaggtagaaggatatatgtcctggcgggagatggagaccaggtgaggaagccttgcgggaggtggtaaattgattgggttttattctgaatgtagtgtgaagtcactgtaccattctaaacaggggaatgctgtgatctcattcaaatctgttaaaagggcattccacctgcctacaatctgaagaacagattgtaatggggcaagagtagaagcagggtgattggtcaggaagcgattgccaggagctgatgccaggatgatggggacttggactaaagtgggggaagtagaagtggggagaagcagtagattcgggatgagtcctggagatcatgctaaatggtttgccctggattgattgtgggagagggaacaatgagtcaagtcttgagccagagaaaccggagagatcgttataccatttcccgggatggagaagactgggaagagccctttattgtagaggaagggagtggtgaggataaagaatataatttttggcgtggttgctttgagacattgacatacacaggtagacagggaggtccagtaggcaaaggcacacagacatttggagaggagattgctttcagaggagaggtcaagactggggatttgccagtctagagatgatatttaaagacactggggctaggcacggtgactcatccctgtaatcccagcactttgggaggccaaggcagaggattgcttgaggccaggagttcaacaccagcctgggaaacatagtgagaccccatcacaacaaaagttaaaagaattagctgacatggtggcatgcacctgtaggcctagctacttgggaggctgaggcaggaggatcacttgaacataggaggtcaaggctgcagtgacctatgattaccccactgtactccagcctgggtggcagagggagacctcatctcaaaaaaataaaaataaagatgctgttctgagtgagctcatctgacaggagtatagatagataaagagagtaaagatagagaagaaaagggaagacttaacaaagaaagtgcctgttttcatttccggattcctttgtgcatgtacacttcagtctccctctatatgaataaaagaaataacaacaacaatgacaaaaataacaatgatgatagccaattcttttgtggtacttactatatgacaggcactctttgaagtactttacatattcatatattaatttcatgcaactatatgatgtagacactactattcccattttacagccaagaaaacaaaggtacagggagtttaaagtcatttgctcaaagttacacaacttgcatgtggtagagccagattcagcccaggttgtcttggcttcagaacccatgttctcattgatattctgtatttatatatacaaagcatagaaatcaccaagtatcatttatcaatataatttgcaattttgtgaataacagtaatttcaattttgaaatattagtaattttgaattgctaattgttcaagcaaatatttttgctagagtatatttatatttctacaagcctgtttaatacagtttgcactttacattaaaaagtaaattcagcaaacgctttaggatactacccttgactaatagtattgcacagtaaaagcacagactctgaagccagtttacctgggctcaaatcccagctctgtaattttccagctatgttgagaacatgactttaaccttttcctgcctcagcttcctcatctaaaatagtacctttcttatgggcttgctgtaaagattaaatgacttaatatttgtaaagtacttcgaacattattcagtacctaggtgctgtggtaggcctgttagttaggtctgttaaataactacatctaacgtgcataactctaggtacaggaagtgaggtttcagaaaaagcaaatactctactctgtgcaggttacttacttatattcaaaagtaattttttaaccccagttgctctgtgcaagttaattactcatattcaaaagtaatttttaaaccccagttgactaggttactctgtttcaggaaccaggagttgagaactgggaagtcagaagcagggtgtgagaggtagaattctagggacaacactacaaagtcataaaatggaaaagtcagcaattctaagttatgggatcaccaaatattcagacagataacccaataaaaagagaaatgcctcttagggtgcatattgtcttaggaattgaaatgaggctggagtggagtgggatcggggggagaagatatggaaatgtttccaggggaatttagggaaactagtagagtgcttgttactactcatctaagatgtttaacttggcactctattgcctttttgatgtgatatcttgattgttttattttagtgcagctgtatgattatttaatatctctatgggtcagttactttaatagtacctttatagaattgttgggagtatcaaatgagttaatatacgtaagtgcctagaacaatgcctggcacagaggaagaagaatgtctttgttcttatacatgtgttcataggttcaccacattccctggcccctgtgttatcctattgtttttctcactaagaaaaacattttaaaataattaaatgcactggatttttcatataacttttcacttaatgaagagtcaagtctttagctcatccaaagcaataaaaaatcaacataaaaacaatccaaatgatacaaaaatttgaatacatttatgttgacatttcagtgggtagacagtaaaatttctcagaggcctcacattttatttttgaaagtatttcatgtgctttataaaatgatattgatgagtacagtaaactgatgataagttaaattctctaggagagaaattaattgcattttagtaataatttaatggtctgaaattgcctcactttttgatgaagttgcagaatcatatttaattcatatagtagataaaataaagaatattaattgaagcatccttggagatcatattgtccaactctgtaatacaactagtgatgtaagtccaagttccagagaggttaagtggcttcttgtaggtgtcgtacctaaggtgaaatgagagctcctgattcttagtttgttcttcttttcactgagtaacagtgaattaaatgaactaacatttatatcatggtctacttactaattttttaaacataattgtaatcaacatttattaaaggcttgctatattccagggacagcattaactggttttattttattcttgtaataactctatgaaataggagctattttaatctgcattttaaatatgagaaaactgaaacttagggaagtcaaggaaccaacctatgatgccagtgaggggatgagctgggatttgaacacaaatcctctggctccagagttcacactgttaaacaccattctatacagtttcacagttaaatggggccaggcaaaaattgaagcctgggctgtatgcaggtctgcaaaatgggtatcataatagaaccatatttcctcactattaaaatgggaaaaatagcagcacctatctcatagggttgttgtgagaattaaatgagttaaaataggtaaagttcttagaagaatcttacacagtggacagtcaataaatgtaaactatcctgactgtatttctttgaaatctattaaaatctttcagggttcacttataaggagactggtccctctctgaaacagatcgtttgagaaagtcccacgtatatatggagatgtccaaggaatagattcatactaatgtatacttttggtgcttcagttaagtggaaagtgcttcagttgaatggaaactccagacatttttttctgaatgatgttctaacaatacaagaaggggaagctatgcagtgtgcttagaatgtgatgaattacactcccaccatcccccaagttgtgctgataaatgtgcaagggcaaagaaagttagaaagttggataagcagatcgattggtatttctttttgacagagttctgctgcaccttgaaatggggaatttatcaattcattcagcaaggaatgtgtgctttttcgtggacaattttctaggcactgaggatgaataaaacatagcccttctcattgagaatcacacagtttatatgatgtaggcaaatatatcagtgataaaattactgtagcacacaagaagtggtaagtgaacaaagagtaatgggaatcctgaccagccagggagtactgcctggagagcagggaagcttcatagaggagatctttgtgttggcttggaaggccacgtatgactttcttaggcaaggaagataggaaagtgttttcagacagagaaccacagtgtaaaggtaaagctcggttgggaaaacatagtgtttgggtaaaggccatgttgagaagggggtaaataacactggagaggctgtgcaagggtcagtttatgaggggcgatttcaaatgggggcatgagatgatcacttttgtgatttagtataagtctgtaggccatgtcagctagtaggaggggcaccagatcgataactgtcatgttatataagatgagggagtgagaggtgatgagggtctgacttcaagaccactggcaatgaggatggagaggctagaggtgagagatgcctgaagcagaactggtagggtttgatcaccagttgtctatggaattaattggtggaaagtgaaaaactgaaattgatcctactgttcctgttatttatgtaggtagtgaacaagggtaatggaacaggtgtttgcagggaagctgatgagtttaacatgtgcatgtggctttgcttctattggcacttaacaatttctttgccttttaattttagttttcaacatgtatatatcttgtctacccaatgagattataaatatttgttgaatgaatgaaggcatgtaggctagtgatggatagaagtatgtttgtgttaagagaaattccatgtagatctaccacgataaaaggtgtggaattgagaactctctccaagtggaatgtctgtggggactagtagtattgtttaaggtgataaggtaataaatgggaatgaagtgggctgttaggtgaagttgtagggcatggccaggacctgcaactgataggaaagtgtctggagaagatgcagtcgtcatggtcagtgctgtgatgattctcggggttacatagtaccatttataatctgaccttttcatttggtacttagcacaggtgactttgtatcactctgtgtgtgtgtttgcacttgtgtgtgtttgtgtgtgtgtggtggcaggagccatggtttggtccacgtcatctaggctgaatgaacatttactaagtttgtttatttgtacatagaaattctagactaacaataattatagtgaacaatctcgtgttaataaagtatgtataattcaggaaaacatttttacagttttattgagtcctttgggcttttgaaaaatgagattatctctaaaggaataataaagcatatgctaaaaaatgtgggcctgggagccagactgtccaggttcaaaatccagctttctatctgcgtgattctggcaggttacttgaattccatctgctttggtttccccaactgtatgaaggaggtagtagtatttctcttacagggttttgtgaggttcaaataagttgacatatgttgatcacttagcacagggcctggcacatggcaaatgctccctgagctgtaggtgttactagtgtactccactgacagtgccatggagaaaagtggcccaccatttaaacatgctttctggatattttaaagaagtggctatgcagaggcagctttctcctctgtcacactgtactttgtgtacagtgtgtggggccagaggcaaagtcacatgttgcacagccctgaggccacgttgtatctcagcctgcacccacacataggtgactgtcctgggtatgtttcacttgtgttcccattttgtccttacaccagcccctttaagatagagagagggaaattgaggcccaaaggcaataggtcacacatgccattagctatagagcttaggatagtattcattcattttattctaagcaatacttattgtgtgcctactgggtgccaggccctgggtctccagagatgaaagatgcaccacctttttctgtcaccagcatctcttctgtatggaatatttttgcctaatttgtgtctcacagggtgggttatgtaatgcagctgctccctcctgccccatgtgctcacttcctgagtgcttattgcatcagactgactttgattcccaggaggctccagctggggacctgaggtgctgctggtgccaccttctctgaggagatgctgtcctcaggagtctgaagacaaatgattgtgacaaactcagtgttagcagctatggtcaccttgaagctagctcactgtgacccatctccatccctgccctcccacccatcaccccatacctttgtcctgaggctcacactgcccctgttttttcttttttttcaaaatgctgttttaatctattccttgagccatagatgaaactaggtggcttggagcctgtggatctcagattgtttgtcgctgttcgctgttctagatgttctccaatttccctgcaagctgtaaaactcattaatcccataatgatgatttagggctgattaaaacataaacagtattactattaatgcttgctatgccatatttgtattctcagttttctatatacttttcattgagtagattttgttcttttaaagaagatatgtgtcttaagcttttaaagacacttttaagcttaatgtacaggaaaacatcatttggttccttgctctgattaatttctactctcttttccctctgacccacagtttggggatatggattcctgtcagtgacgattattaatctggcatctctcctcggattgattttgactccactgataaagaaatcttatttcccaaagattttgaccttttttgtggggctggctattgggactcttttttcaaatgcaattttccaacttattccagaggtaaggatgttggctatttgtttctgtgaataattgtttcttttgaacgttttagcactttgtatgtttttagcctccataattcttacagcgttttatggtctagtttatagtgtcttggataagagaaagctgaatcacagcaattgtaaaggcttgtcccaagctgcagtggatatcactatcagagacaaaattaatattctaggaggccagccactaggacgtgctcagacagctctgggacacctcagaaggccttaaaactttattctgccttgcacttggcaaatttaatttttccacacactgtttcattatttatttatttatttatttttctaaagagcatgcaatgtcaactgtactgcaaatgtcaaatgtaaatttataatgtatttaacatataccactaaattccctcatatatttactacagttataagtgactagagagtaaatgagagcatggttgacaaaccttttcattttttccaactgtggaaaaaatatcaattgaggactaataaataaatagcaacttattttttttctttgataaaatgtgttattgatctatcttgactatagtgcacactattcaatttatttcaaatctgtgttgtgcccatataaggaagagaaatggaggaagggaaataaatgaaaggaaaagagaggcaatgttgaagaggaaggaaaggagaaagagactttcatagaagggatccacaaaggggaactagagaaatatatgtatacatggactgtatctgccacccacaatgcacacacacagggagagacaaaccccatacagagagaaaatattaatagtatttcagggagtaccacccttatctcgtaatttttagaaaattataactaaagcttcctttaatttttcaagctatacattgaaagtgggtatataactttttagagttatagatttattatcattatttgatctaggacctaagataatatctatttcacagcctcaattgtagagataaaaaatattaaaatttagggtggttaaataatttgattatagccttacaatcagctagtaacaaagctaggatgacaatacagattttctgatttaaaagagtattatatacataatacatttaatatgatataatatatgtatttattatctcatctgctttatgggtcaaagtaaattaaacaaactaatactgtatgtggactaaagactctacattgatgatgttaaggttttctattttcttgaagtttaacaatataaagaatctgtctttgtaataatctctcaaattttcatagagttttttgtagcaaaatgattttccttttcttatttcactttattttcataacctcaatgttaggtaaatggaacatttatatttatatagccattttgcattgtataaacaggcacaaagaagttattcaaatgaggatgcggccatgatgtctccccagaggcaaacataggacaagaacccagacatcttctattctgcttcagaggggagatttacaatgtgtggaatggtgtaaagttgtggcttttcacccattagtctctcctctgattctatttatttgaagtttatgtgtcttgtctgttaggaacatcttgactctttataacttcaaactctaactccagttctttgtcctttaaagaaagaattattccattcttattgctgtgtgtgtgtgaaagagagagagagagtggtggcaattttaaatcttctttttgcttttattcttgggcctaggccttgatttatttacctttttaggatttatcacagttctgtaggtataagaggatttctcttgggaaaacagtaatccaagtggcctgccatatttgttttaaaagtttgattctggatatcatggactaatatattacttttagagacagtaggtaatcaatatctcatttatcttcattatctagacctaatatcgtattctaaagatgagaatcagagctgctgctttactgctaaaagtttactctttcaaggcaaatattgctgtaggtgttataggtgggaaactgtaagattctctggtggctttatttaatgagacttctagttgtaaggtttttgtgccatctcatacagttttgtcattcaaatttcaaagtttttgttttgtgatttttggcagctaagtttccaatattacttggatgtgaagagagacttagaacattggtgagaattgcatactggtattattttccagaaatcaagttaaatttcttggttttacttgaattgcccttttttctcccttaggcatttggatttgatcccaaagtcgacagttatgttgagaaggcagttgctgtgtttggtggattttacctacttttcttttttgaaagaatgctaaagatgttattaaagacatatggtcaggtaaatggactttatttaaaacatccaatattttaccccctaaagctactttatataggcaaataaagacagaaattttatttttagaattatgagaatggtccagttattaggcttgtgagtttaaggagaacaaagagtcaatatattgacaagtataagataaatacttgattcatgttgtaaaatttggaggttatttttgttttttttcaagtatcagcaatttaatattgaataacagatgtgcataattcatattctattcatattcatcaaaataagagtgtatacgtgttctaacacgaacaaacagtaacagcagaatctaataaatgaaaatacatgtaaaaaagagaaattttatatatctaaaaatacttctttacacatagaatagacatacaattttcctcttataaataaaaagcagtaaactctatttccttgtctgtatgaatcatcttttttcttcttataatctctttggtttttgttcccatatagaatggtcatacccactttggaaatgataactttggtcctcaagaaaaaactcatcaacctaaagcattacctgccatcaatggtgtgacatgctatgcaaatcctgctgtcacagaagctaatggacatatccattttgataatgtcagtgtggtatctctacaggtatatgttaattccatttttccttcattatactgcattctttatactgtgtaaacatgactgtttatgcagctaagtcagtttttgtacatttatgtatgtcagacttattcctatatatgtggggtaactggaatgtaagtctgcattgtttttccaccttccctgtatatgtttactctaaacaagtgagttaagaaagaaattgtggatcactgttctggacttcattattctctaagattatttactatatgagagtctctcaattgcatttatacaatattatatagcaaaatttattcagagcatttattttacaattctttgaagatccagaatcaaataatcctttgattgattttgaaattgcaagaagatttgcaaattattaaaattgtttttattaattgtctgacttataatttatatttatatccacatcttctaaataatattaataggcacaatttcttgagcacgtatcatataccaggtaatatgcttagcacttaattatttgatctcatttactttttataacaactactcagtgtagggattatttcttatgtattagaactatattggtttcaagtgatagaaatcaaacaaaattatatatgcacaaaggacaacttactggaaagatactagatgactaatagaacagccaagctacaggaaaaacaagaacctaggaaacattagaacccctaggactctccctccttctctttcctgtctcttagtatcattcttttctttcactgtaggctatcttttccataagtgggatacatagccactagcagttcctgaggtttgtcttataatttcagctactagaaggaaattgacctgactctttcagtcctaaatccaaaatctctggcaagtgtcttcctggttcagcttgaattagatgatcacttctagactaatctaagtgcttagagggctgggcccctttaatggtatcaagggaatgtggatggagtagaggagtggttatcaaaaagggatgctgaaaagatagtatcactggtgtctacaacaattctcatttgacagatgaagaaagtggaactttagatgttaaataacccctccaggtttactcagctagtgaatggcagatccacaagctatatagttaaacatgatataaaagtgaacagctaaaaacaaaataaaaaggaaagccagttaaggggaaaaaaagcaaaaaaaatagagcaatctggaagagattattatggcaaatacctgagtttccttctggaaagaaaacatgattggtcatatgcttctctccacctgattaaggaaaatctcaagtgtatttgaagagccagttctgtgttagcactcagctaagaggaaattattttttgcagtgtaatgaatgatgctttcagccaagagtttgcaaagaatctggaaatgttcaagtatataatttcttacaataataattacaattaacattcattaaatgctcaaggactatgcctagaacgttagatgaattacttcatttgatcttcctaataacctagggggcaagtgctgttgtaattaggagagtatgacttagagaggttaaatagcaaacccaaagatgctcagttcctaatggcaaagcttggattagtaccaaggctgccttataccgaagcctgtgttcttatatactttgctggactgccttccttatgttgctgctctactgtaagcaagatgacaacatcaactgttaaatatttattttttgtagtggggaaaaataatttgacccaaggatattgctttctgaggatatattatttaatgcgaggcacagcagagaaagcctaaagaatagtagttaaaacccttccttataccatgtgtctaaattctagttgccttacacaagcttttggcaaatactggattatagtgagattgtggttgaactctgacaagtcattcaagaggtgccagtcagctatattgctaatttaaacattgattaataattctttagataccagatggcagagggataatctgccatgaaatttggagcctaacttgaattcttgctctgatggaagattttcctgtatctttccagcgttaacaagataactttaggcagggctacacttctacagagaaggagctttgaacctggtccaaccttgaacaagttctcccctgggatcctcaagtcctgtaacacaaagcacggaagagatacagtttgagatttaaaatatttaaagggctgatcacctccttgaccatactagaaactcagtgtgacctctcctgatttcaggaaagttccttctgatgaacctactaggataaactagctgctaaatgtgccttgagtatcagaatgagctgataggcatatttatatttagaaaggaggatggctgtcaaagccttcagcttttgtgagaggctaaattatttttttaaatcataattaacaaataagtttaacttctccaaagttatattttagttaaagatttaaggctcctgatttaggattagctatgggcagaagacatgtttgcagtaaatctaagcaccatgacaaagatgaggccctcgacatgatcctgttttacataattttgaaataaaatcagaaggctgtttttattccacttatgacagtaatgctttcatttacttattcaataaacatttattgagttcctgttcattgtcctaggcactggaaattcagaagcaaattcttgaggagcttacagtttattcaatggaaacataaaatatagaaatgagcaaaacaagaaaatatcatatagtaataacctaccttgatgaaactaaagcatggtgatgtgagagtgatgtgtgggagcttcttttgattgactgttcagaaaaggtccctcaaggtgtcagtagggaattgtataatgagaaagaaccagtcatgcaaatatcggggaagaaaatatgctaaagactttgagaataatcaaacaggtcacacacaagggacctggaagctgaatggtagtggacttccccacatcaatgctggagagcagtggcacaattccttcaatattctgaatgaaaacaactgtggaattataaacctaggtaaactacctatctagtgagagggaataatggaactaagattctggaaatacacttccaggaataagaaggcagctgaagaaagaagagaaggtgcgtgccagggtgacagccctgcaccaggccttgagataatagttttgacgttaatttcttatggggactattttctcgctattttggttgaaggtatagtctcaaataaatagacatttaaacaaattgagcaacagactgcaattttcagttttgtttacattgcacaaaaaatcaaaagaaatgaaatttaagaaataagtaggtctggatattgctttaagagagtaagtattacaatataagtgatagtgattttaataataaaattaaaatactttctaatattttatattataaaaataatctaacctaggtgaccccattaaaaggattgaacatgataatataactcagggttcaatttgagttacaagtatggatttaagaattttgttgacaatcccggctgtcactgcttcaacaaagtttttccaaattgaaaataataaggaactctctaaaaattacagtgagttaagaaaggtggtctaattggcattactgtcaatagaatgtaaattatgtgaaaatctagattataaaagcataatttttgatcttgctgaaatgtagaaagaacaaagacatgttatagaatacttaaactgtatgacttaggaatgtctttattattcatccaagcaattctggctcattacagaatactcagctaagcaataatatttaaatttagaagtctctggtgttttatctgtgtttagtcatataaaaatcatagttttacacatatgtttttattttgttttcatggaagcatatttatcacagtgaaataatagaagatattaacatttaacagttagcttgattataacttttaaatatttagacgaaatgatttgagagttccttaatacctttgctccaggcctactaagtgtgaggcacaacagtctatgtggcatgcgtgtgggcacgtgcatgctttttggggaaaagtgggggtcacagaggggtaaaaaggaagatgtaggaaaaagaggggtgcacaagatgctatttccccagttattcagttattgttactaggtaatgtgtcacatgtcaccttgtgacatgctttgtgtttttctcttcgacgttcctgtgtagccaagtgtggagtcatttcactatctctgcagccgggtggggctccccagcccagacacagccttggtgtttgttggatgttgattgctgaggaatgtttggtactttggggagggtgtcagctcttcaaggccactagagggaccctggagctcgttcctccagcaatctgtcatcagtctctctttttatgaaatttcctgtgctttcatttaagaatagatactattaaatataaagtgatttttagaagttgattattgtgaattttatgtgtaaagttgaggtgcaataaaatagaatttagctgcaaagtgtggagatgttagggagattttctttgttgatgactgatatgaagtgacactctatgaatagaatgctaacatttttgaggtggttgggcctccatgagagtttaaatacacataattcattcaacaagtatttttccagtacttaacatatacttggcattattctaagtgctggcacatagggcacagtggagaggagatgaggacccagagcagttttcaagaagtaacagatgaggtgagacagcagagttcacagattccaaactttccacccttccataacataactgaaatattacacattttgcacagaaaaatggaaagcactctttttttttttttaagtatgaaatacaaaaaaaactgactggaagttctgtgtgtacatatatgcatggggcttgtctaccagtcttttgggtggtgtgtttttctccattcttgcctggcggtgggaagaagggtagaatattactggctatcacttgggaagtggagtgggaggagaaggggactggggcactaagaatatttgacataacacccctttctttagtactgtacttcccaactgtcttcagtttgctttgtgtctttgaattgagggtctctctagttcactttccccaggggtagatctccagtcatcatttggggtggctgccttgccacattggcttgggaggaaggacttgaggttctacttgttccctaaatagacttgcagccacttctcttatgtttagttccggtctttgccctctgccttcagaagtacttggtgcctctaatccctgaacttttttgaggttctgggtcctgcatcactttgcttcttgttgactttctttgtgaagtcagtcagaacttgccttcctctttccatcttccaaaatacaaatctcaatgctgtcatgttgtctctctttcctcctgtccttgcagttttatgtctttattcctttataaggacatagcttcaagagggcatttcaggatggactagagataaatatgtatatctggtctgcactatttcactaaaagaccatttactattttaaatcatatagttcttgaacatcacaagatttaaaaacagaaattagttaatttcccctataataacaattaattaaaatagaaaactatacaaataataaaatgacataagaaatgatttccactgatcttgattgactggtacttacataaaaacagtaactagaggcagatgatatagccaatcatgaggagaaattctgggttgtctttgctgttagtggaatttctctctcactgggtctatctcagagcatccctgccctggacaggtcattttatctggctttactctatgtgttgctaaggtcatgaaaattggtacctgaatccactgaatttagcctactttcactgatatgaagtatacttttattcatgaaaaactgttctaaagttttttttttattactccacaaaattcttatttcttattttcttactttaacaaggagactgagatgatgatttggaatgtgtgaactctgctgtctcacctcattacttctgttacttcttaaaaaaactactctgggtcctcatcttctctccactgtcccctttgtgccagaactggtgtcctttctcctttttaaggccagttcctctaaatattctcatctttcctgtggcctcttccagttttgttttgttttgttgttttaggacagggtctcactccataacccaggctggagtgcagggcttaatcagagctcactgaaatctcaaactccttagcctcaagggatcctcccacctcagcctcccaagtagctgagactgcaggcacatgccaccatgcctggctaactaaattttttttgtgtagaaatggggtcttgctatgttgcccaggctgatcttgaactccaggtctcaagtgatcttactgccttagcctcccaaagtattgggattacaggtgtgagccaccacatctggcctgttttcatttatctttcctgaatctctccttttcccgtgtctacaaacaagttccatcttttctacctcaaggtgttatttttttcctcaatctgctactcccaagttttctcaaaccttctttcccacaactgtccaacttttctaaagattggctaattctgaaataagactatatatgttagacatattcttaaatgctttacatatattaactcgtttaatcttcacagtaacaaccctgtgaggcaagtacgattattatttccatcttgcagatttggaaactgatgtacagagaaggtaaggaacttacccaaggtcacacaggtaccacattaggattgaagtgcaggaatcctgtttcctggtctgtttggttaacttaccttacactacgctgcctattgtttccatttgttaaccagccttcctcatcatctccgtacatgcttaatcatgtacagtttctaaactcactacctattctctgaacatttttagaataatgtaagtggttgttctaggcagcatgtgatattcctctttttaaaattaaattaaattattcattttttttgagacagggtcattgtaacctcagacacctgggctcaagcaatgctcccactccgccttcagagtaattaggactacaggcgtgggccacaagctatgttcctaatcctcattcactctttcttcctgagccattcctatagtttaacacgtaagtgagtacctattgtgggctaaatgctagaaatataaaggcaggtttttcgctggagcccctcccctccctgttgagttacttatgaggtggtcttggtaacatgataccatccttgctctgtcaccattttagctgctgtaatactttcctggtgcttcttctgagtctccttttcttgcaaggcagttggatgtggaagagaagcataggctttggaattacacaggccattgtttgcatcttaggattaaaatatgttgtttgatttgggaaaaaataattaacacctttgagcctttgctcatctgttaaatgaggagcaaagattcttaatttactgatttttgtgaaagtgaaataatttcttatgggtcaactatgcaacattgtgtctaatacattgtacacttgtgataaatatacatctccctccctcttccatttaccatttttgtcttttcttagtttttatcatagtcatcaagtcgcatcacttcatcttttgcacctttgggaatagcttctaaatccatatgcttaattatgtaaagatcatcacttaaaaagatgacttcttgtaataaaccacatagctgtttgaatctatttgtatatgttccttctaggttagggtaacaaaatgagaaggtaaaatatacagaattccattctttctcatttttcttatctaccttaaaatttgagtagattttctagaaagtaaagctggactttaaaagctcataggtaatttagtaataaagacaaccttctgaatataaatgcccacaagcctgcctttgacctgtcagataaattaagagaatttggaacatttactctctcttaatggaagagaatcttaaagtccaatataatttgctattcaaatgacgatttatcaggctttgcaccaccgattctctgttagagccttgaaataccagctagagccacttgccaaggaaggaaaacactacattaagaactacttgcttttccccagataaaagcttgtccaagttatgtaaatttgacaaaagcattttatttgatagctaatgtcaggagggatctagggttatctgttctggttccttatgttagctaatcatttggccagctagtatattccattcttgtggaggctggtggcatcaacatttacacagaaagttcattaaaaaataaaacaaacattgggccaggcactgttggctcatgcctgtaattccagcactttgagaggccaaggcaggtggatcacttgagtccaggagctgaagaccagagtccaggagttgaagaccagcctgggcaacagtgagaccctatcttaaacaaacaaacaaaatgttgatattgccaactcttaggtcagctagtataatcaaataagattaggtatgaatgtgcttttaaaggtacaaaaatctgtactatttactctgtttggagaacagtcagtttcttatgggtgtcagtcatggactactttgatatccatatgaaaagataacattctcattaattgtgtgataaacatttaaatagtcagcatttttgtggagtttataattttaatcctttggaatgtgctttcaggtccatgcaaacacaattccaatgttatgaagttttgagttctggagataatctgtagacttttaggtttttcttttccctctgtgaatagttttttatatacatatatataatatatatatttacatatatacacatataaacacatatataaagttttatattatatattaatatgtatcatatacatatatattattatctaataaatagatgtgtaaaaatgggtcatggagtatgcacacatttaattttgctgaataacaacaaaatgctttccagcctcttatgtttgtttaccttctcatgaacagcaaaaaataattcctgttttctctttgtctttagcaatacttggaaatttcagacttaaaaagattattgccaatttaataagtctgaagtggtatctttttctgatttgtctttctgattatagtgcagttgagcatcttttcatatgcgttttggtcataagtttacttttatgtttcctattcatctgttttgcacatttttagttgagtttttttttcttaatgatttgtgttaaagaaaaaactattctgacacttgttaaaacagtaaggaagagtgtattcaagactgttgcaataagggttgcttctatggcaacagcggagagagattgggttcaactctaaataaagtaaagacaggttggcatttatagccaattagcagagagaggggaagaatgcatggaatattcttaagagaaaacatcaagggtagggggattcctactaaaccaatttaatggaattcttgctgaaggcaggccagggtgattatatatcactttggggatggtggagaatgaagaattttttaaaaataattatttgatttttccctgagtcagagggaatgaggaatttgatcagatattaagagtgatcatatataaaggatgaggggattcttgctaaactgacttggcaggattcttgctatgactgaattctgcaaaaatggacacagaagtcgaaggtctggttgagaagagacctcagaggagcctaactgaaatttggtctaagaaagagtctgtcatttgtaggagttttacatatattctggatgttaattttccttgattaaatgatttataaatgtattctccaaatctgtggtttctcttttcactaagatttccttccatattttctttcaaaaattttaagtttaatttatttttgtatatgaggatccagttttttcctgtataaataagcagttatcctcgcttcttttgctgaacagatcattttattcctgccgtgtatcaagtttgtatgtattaatgtatctgtattttggctttctagtctctttcacttgtctatttggaaaaaaaaaacaaaactctgacctaccaccacactgccataattattatagtttttagtcagctataaagacaaggtctgctcctcaccttgttttttcactaaaagttgtctttgtttttccatatcaatatcattgtggagattttcattgacattgcattgaatttagagattaactaggctgcagcttacatttttatgatatttaagattttttggtttggtaatttactatattagaaatatttttaaaatattctgttagatttcttcctaattactttgtagctccacaggtatcacaaatgataacttttttcctactgttttctagttgattattactgctatgtaagagtacactgattttagtacactggttttgcgtcctgcagtagtgctgaattctcccagtattgttttgtttgtttattcttttggactttctgcatccatattgaagagcaaagaagccctttttaatttgttttctaattgttttaactcttatttctcttgttttattggcaagggctcgtaggacaatgttgagtagaagtggtgatagttggtaatttgtcttgtttccaactttaataggaatgcttctaagctcagtaggttgctttctttagttttctttttcttttaaatagccttaattagattaagaaacatttttctcagtgttgaatttcattgcaacttttttctttttctatattacagctaaatataggtaatctgtacttggctgatttttctacttttagaattagggaggcttaaagcagagtgaaaaattaaatgagtgaataattatattttctcacaaaatttgtgtcatttttgaattatacattgttcattaggtgttaattagtaacatgaacattagtgcaacttatctttgtcaaaagtacttgagtcaggtagatttgagtttaaatctgactctgataactaatcgggtttcttcaacttctaaaactcactttcttcatctgtaaactggcaataatatctacaaggcaggattattatgaggattaaatgaaatatttttaaagttatgactaagagtaggtatgcattaaatactaaatcttattatttctgtgtctaccatacaaccatacatcaccatcatgctcctgagaagtgagggtgatggggattaagtaagagaaacagcatctaacattatgtatagatgcaaagccacaaagtcctctatttcaatgacggaatattgagcaactgttgaaagagtaggagacttggttcaaagtcatcgaatcatatgccagatttataagcacttatcaactggaaggaggaaagcattttatgcagtggggtttcttgaagacataatggggatcattttgaagattcaaaagtagatggattagttcatgtaagagcaatttatagccaagagtgatatatatgagggcttccagaatagactaagagaacagggcctccatggcagtttgcagagaacaaaatcaaatagcaagtttgagcaaaggctataaaggcagttggattgaatttttagaagttaattaattaaattgacaaataataattgcatatatttatagggtataatgttatgttttaatatatgtacacattgtagaaagatgaaattaaacttattaacatattcatcacttcacctatttttcatttgttttgttgtgaaagcatgtaaagtctacttttttaaaagcagttttgaactatacattatgctatcattaactatggtcactatgctgtgtaatagagctctaaatcttatttttcctttctaagtataactctgtcccttttgaccaacatctctcctcctcccagtccccaggcctctggtatcaaacattctactttgtttttatgagctcaacttttttagattccatgtgaaaatgaaatcatgcagtatttatttctgtgcctggcttagtatcctcccaggttttaaaatatgcagcctttaaaaagaaggaaatgacaggatttccttctttttaaaggctgcatagtattctcttgtgtgttgataccacattttctttgtccatttgtctgttgatggattgaattttgatgctttgcttcttcctgagaacacatttcctggtgtcaggttcattagaagagagcttgatggacaaagtcccatgtgctaggccatcccatccttaggggcataacaaagaaaaaacagaagaaacagaagaaaatgaccaggggccagagtggaatggagtggtggtatatttttagctgtgaatacaggaacccctgtggaccctagtatattggaccttctttgagaaggtgtgtctttgtttgcattgccctggctcagacgaatgagaataatagatcatcttccatagtatgtttatctgaagatagagaactggtgtggggtagggagagaacattttggaataattttcaagaaagaggagattgggaagatctgccatggacagcagaaactctgtgggtaaggtgagaggtccaaagtgtatttaggacgtgttgctgtgtggtgtgtgtgtgtgtgctgaataactcattccttggtttagaaaaggctttggcaaagaatgcatacattttcaatgcttctaaagttacatgtagctactctggggaacattattttgctgcaagtagctgaaagaagaggaaaggctggatctggtaaagagatataggaaaagactagaaaagtaaactattttaaggagtttgtcattgaagtgaaaaaaaaatgagggagaagagcagttcagtggagtatcaggatttgggattgtgttagatttaagacagagaggaaaggccaggcagacagggagaggttgaacgttcaaaagagaatggaagtcatggtagggatatcttatggagcacatttctagagaaaaaatgaaaatagagtacaagtggagctgttcacaatgaaaaggaaaagggttcttattctaagatgggatggaaggtggagaaagtgtttgtgggtggattgtgagttagatgttctcaatttcaggcaggtgggaagtagtaatgaaggactgtggggttggggaaaagtgggaaaggcttttaataggctctctcttaatgtggttcacgttgactagcgatgataatacattgctgagtagaaagtcagaatcctcagccctgagccagtgtcctcattttcaggggccaaattgttgacgtttaccttcttcacacctacaaactcaaccatgtactacacagctgtgagatacagagtggtggcccatctagttagaatcacacactgttgtagacaaggagaacagtatgccttgaaactctggagtgcactgggagccaggtgatcacatgaaagtagtctgcttctttgtatgaagttccagaaacatcattatgttctttacctcctggaaggctgtccctgctcagatattctctgaaccatagtcggtgtcaaaatcagatgaatttggttccagaccactgcaataaagtaaatatcacaataaagcaggtcacatgatttctggtttcccagtgaatataaaagatatgttttcactacactatagtctattaagtgtgcactgtcattatgtctaaacaatgacattgatatcttaatttaaaaataccttattgctaaaaagtgctactgatcatccaagctttcagcaagttctaatgtttttgtaagtggagggccgtgcctctgatgttgacggctgctgaccagggtggtggttgctgaagtttggagtgactgtggaagtattttaaaacaatgaagtttgcaacatcgattgcttctttcatgaaagatttctctgtacatgcgagaacatgctgtttgacagcattttacccacagtagaacttctttccacattggatgccatcctctgaacctctaccactgctttgtcaactacatttatgaagtattctaaatcctttgttgtcatttcaacgttgttcacagcatctataccagcagtagattctgtttcaagaaaccactttgtttgctcattcatgagaagcaactgctcatttattcaagtttgatcatgagattgcagcaattcacttccatcttcaagcttaacttctcattgtaattctcttgctatttcccgtacacctaccgtgacttcctttactggattcttgaacacctcaaagttatccatgaaggttggaatcaacttcttcccaactcctgtaaatgtggatattttgacctcctcccatgaatcataaatgttcttaatggcatctagattgatgaatcctttctagaaggttttcaacttcctttgctgagattcattataggaatcactactatggcagctacagtcttacacaatgtatttcttaaataatatgacttgtaagtcaaaactactccttgacccatggacttcaggagggatgttatgttggcaggcatgaaaacgacattcatctccttgtacatccccgtaagagctcttaggtgactagatgcactgtcaataagcagtaatattttgaaaggaatttcttttatttttctgagctgtaggtcccaacagtggactgaaaatattcagtaaaccatgctgtaaacagatgtgttaccatccaggctgtgttgtttcatttctagagcacagacagagtaaatttagcacaattattaagggccctagaagttttggaatggtaaatgatcattggtctcaacttaaagttaccagctgcattaaccccaaacaagagagtcagcctgtcctttgaagctttgaaaccaggcactgacttcttctctttagctatgaaagccctggatggcatcttcttccaacagaaggctgttttaccaacattgaaaatttggtgtttagtgtgccaccttcatcaatgattttagttagatctcctggataacttctccatcagaacttgctacttcacttggcacttctatgtcatagagatggcttcttttcttaaacccaatgaaccaattctgctaccttccaacctttcttcttcagctttgtcacctctctcagccttcatagaattgaaaagaggggcttgctcctactttagggtatgttgtgggtggtttgatcttctatccaaaccactcaaattttactcatgtcagcaataatgctgctttgctttcctatcatttgtgtgttcattggagtagcacttttaatttccttcaagaagttctcctttgcattcacagcttggctgtttggcacacaaaacctagatttggtctatcttggcttttgacatgttttcctcactaagtttaatcatttctatcttttgattttaagtgagagacatgcaattctccttttacctgatcacatagaggccattttaggattattagttagcataatttcaattctcttgtgtctcagggaatagagaggccctacagaagggaggaaattgggggaatggctggtcaccggagcagtcagaacacatacaacattaattggttaagtctgccatcttatgggggcacagtcatggtgtcccaaaacaatgacaatagtaacatcaaaatcactgattacagatcaccataatagatataataataatgaaaaagtttgaaatattgtgagaattgccaaaatgtggcacagaggcatgaaatgagcacatgctgatagaaaaatggtgctgatagacttgctcaatgcagggttgcaacaaaccttcaatttgtaaaaatcacaatatctgagaagcacaataaagtgaagtgcaggaaaaagaggtatgcctgtacctgtcactcctgaataactaatagaaataataatggtggtagttggtggtgtgatgctggtggtacctgtcacgtgcaagaaatatacccatactttgtaaatattattcatatgcaacattcatttaggtgtaattatcttgattgtacagataggaaagctgaatttcagggaggtttaacatcagagtaacgatttgaacttagatttgttacactcagagttcttttaaaaaagcaaaattacttcctgatttgtatgcttctcatcgattaaaatggctactttaaataaaatctaagtatacatttatttttgtgaaaaaattcatatttatttgactagaaatttttgagcatataaaactagaacttactgacataaaaaatagttattgtgtagtgtgatgagtactagagtagaggcatatgcaagttactatgttgagagagacgtggtgtgttttggggtgggacgtgatgcaaatggagtggcgcatattgggatggaacatgatgaaagcgaaatggtcaaggatgctcttctgagaaaatcatgcttgtatccatcttgacagatatgtaagactttactgggataatacagttgggcagaacagcaacttaagtgcagagagtgcttccagtcattgtttttaaacatttgtcattttctaattttgaaacattcaagaaagtggctatagaacaatggtttttaatcattcccttagacagccgcttgatgaagcccattacctgttgcaacagacctaccaaattttgcatacaatttaaaggggttcatgaactcactgatgctcctctatgacctgccagccaatactctctgatatagagaaatacttgaaaaaggaacataaatggctatgggtaagagtagagggcactggggtagctttttagctattattatattaaattcctacaatagcactatgaacttggtattaagtcaacttacagctgcataaattaagatccagttaagtacagtgactccctcaagttcacacagataataaacagcaaaactatgctgaggtccccttctggggtcttgcatcccaagctcatgtttgctccatatacatgatactaatttcctaatgagaatattgctgtaataagttatgatttctaacaattagcttacaaatgaacttttgtaaaacaacttgtagtgagttgaggattgcccgcatagtgaaaccttgttagttttgattaccagtctgtcatagctgataatttatgatttgttttattttgctatgggcttggctatagagtattttggcagcatctgtaaaaatttcttttgaaacaatttttttggcaagattgcacctaaagcttctcaattatctagagaaattccaagttgttattatgtgtttgatatgttgtgttagtcttatccatacactgtggcaggttttgtgaagaacctctaccgttatctcgcctttgatgctggagagcccagtttgttagtgttaagttctggaaagcaataaaagtgcatctatctaaacatgttctatactaaattgctttcactaatcaagcaggacttatccctatttagaagaattagtgaggttttagtcaattaggcttgatgtcaagttaatttttcctccattagtgtaatgaagaattgctgtgttgttctgtcatgcatgctgattgataaaaaaagttaataatgaatgccaatacatttttctcttgaaaaatgaaccaataatatatgaggttcaagtaaattattctgctcatcagaaagaattgcttattctactgtgtggaaagcccagtggcaaaccaggggaagcaatggaatatttaaatacttattctattgctggtcagtctttaacatcagctttttaaaagattgccttataaaggatgtccatttcataattgttggatgactaaaatagaccactttgttttctttggcttctgctatttgcttatttaaaaatatttatattgtgctctattctttgcatgctgcattctgcagtttgggaatactgaatcaagacctggtgagtaacttttactcagtggattgcatgatgaaagatttgccaaaccataaggtgttttattgtaataaatgaaatccatctcccttgaagaagcacttgcagaggcagaatttactctacattttattattccattttatttattctatatattcaaagtaaggattctaaatcaaaaagataccaaagctaatgcatcctgtaaatgaagtgtggtcttgccaaactgctttttgaggttgacattactatattatatagtaattagcagactggctcatgcacacatacacacatgcacacacacacacacacaccctcatctataatatttatttgtctctacaatcatatctattcagttttgtgtctgaggtaaatttccagataacaaatttcacttttataactattaatacttcactaataatcttagtgaataaaaaaagaattgaagatatttgaagaacaatttaagtgctgactcttaataaaagtattaagggttagagttagggcattgattaggtagtgaaatttgattctactatatgtctgcttcttagatagagaatttcagtcccattctaaggctctcaattcaattaataactcttcatttatttaaattaagtggtgacattctcctgcctttaactttgctctccatgctaattattggctcaatttatttagaagtattattatagaagttttgaatcctaataagtagaaagagagaccaatgtgtgagcctaattctttttcgaagtgattaaggtattattactttttatttgttatcaggtatcagaacattaaaagtaaaataaaagaacagactttattttactgaatctctttctacttaggaatatcaaagtgcttaatgaacatgactttatcgaacctttataccaacttagtgaaagtggataaaagtcagaaacgtttagcagcagaggaaacaccaatagagattacattggagggttccataagacattccggcctctggtcttatgctttctagtgtatcctcctctattaccaggttacaaaatatatattggaaaaaataagtgagggatcagccatcattatagtttcctgggttgcaaacaaacacccaaatctagagattatttccatttagaaagtagaatctcaaacattcttttctggacaaacatcacttttgcaaaaatagtctgtattttttttgtaatttttatagtgtttgtgactttgatcaaaatcccagaatcatgtaacttttatattaaaacaataatggcaatcttaaactgggcctctgtgatatatcaggctacttttgtgacaacattttatattctgaatgatatcctggtccatacattaaatcagtgatgctatattaaagcgtaggaagatggtattcagtcattcatttcatcatttattttcttctcatctattcagtgatcacctgccaagtgccaagctctgctctacaccttagaaattccatgacaaactagacagaaaatgttcatgcgctctgccattctggttcattctagtgggacacacagcccaacatcatagagttacaaatgccatgcaggcacttataagtaggagctaactaatgtgtacatgtggacatagaatatggaatgatagacaatggagattcagaagggtgagcaggagggaagagggtgcatgataagatattacttaatgggtacaatatactttatttgggtgatggataccctgacatcaccactactcaatctatacatgtaacaaaattatagttgtaccccatacatttatacacataaaatacaaaaataaattttaaaatgtcctgcagggaattaaaatgtgatatgatgatgtctgggtcactatgttagtgtgggtggtcagggatgacttcctcaaggagaacacatttaagttaaaatcagaattgtaagaaggaaccatccatgtgaatatccgagagaataatattatggctgaggaaacagccagtgagaaatctctatggtaggaaacagttcagtgggttttaggaacagaaagatgaacagagtaggtaggcacagtggatgcttgtataaaatgacattggaaaacattctagatagaaattcttcttcaaagtaagcattcctgtgttctaacacttaaacagtgttaataatacaagacattggctccaaaattacattttattaaatgttataaactaagaacgggtcagtcaggaaaacaactgtcttttgcaatcagtttttgcaatctgtaaacagtagattatatgtagtggatttgaaagctctaggatggtgttttttttctcctcaacaattggaagtattattttaattgtgtgtgaagtgttagcaatcctcagaacacctcagcacattagttcagtgtcttctactcaaaaccagaggtacttgaatcctggaggtactccaccttccaggatggagactggcaaacagcaataaaataataatttcttaccttatagcaacaagctacttaattcagaaattcctcatctgaaaaactcaattctcttgagcagtatcttgacctcttattgcataggcttaggagtcaaatagtctgggcacaaatcctgactttcccattttctagctgtgtcgttttgggcaagtcccttcttccagtgtcctcatttatttcctctgtaatcaggatgatgtacttatcacaggcatttagaaaagcatcttgcaaacaataaatctttaacaggttatctgctttcattgctaatattcttacttttatgccctccctttccaaaccatcttctgaaaaaatatgtaagtccacaaagttagatgcaagatggttgccaataaaagtcttctgccttgagggctgggtgtggtggctcacgcctgtaatcccagcactttgggaggctgaggcaggtggatcatgaggtcaagagatcgagaccatcccggctaacacggtgaaaccctgtctctactaaaaatacaaaaaattagccaggcatggtggcacgcacctgtagtcccagctacttgggaggctgaggcaagagaatcgcttgaaccggggaggcagaaattgcagtgagccaagattgcgtcactgccttccagcctggacgacagagtgggactccgtctcaaaacaaacaaacaaacaaacaaaaaactgccttgatcactagaatagaggaggaagcctctgagatccattgactgaaatgtattttgatatttcatttctctacttaattcagcacccccccccaccatttaattaaaaataatatttattgaacacccattaaacgctaaattctcggccaaaaaggaaaaaaacatcttgtcctgccaggagattttaatccagttcttcaactctcagtagctaagaattggcaaacaaacaacaaaagcatctctgcactgaattttatgttatattggtgaaccaatttggaattgattaatgaactttttttatgcacatcctttccatgttgtgcataaatgtccatgtgtttgctctttggaaagactggaatacatgcttcatgggacaatgatttgtgaacatgtcatgagagaagatgtacttttaatattactacacatttatttagtcaacaaacactcactgagtgcctacagtgctactacattctgggtgaacaggaaccaacaacacagaaaataaaatcctgtatctcctggggatcacaggcttagcttctttggcatggaggctcaaatcctgtttctgcacatttctagaggtatgactttggttaatttacctaacctttctatacctcagttccctcatttgtaaaatggggataatatctatatagggcagttgtgaagattaaacgatggtatatgtaaaatgcgtaggacagtaccaggagcatagtgagaatgcggcaggaggctctgttattactataaatattattatcactactgctctgtgctccagtggtgtattctgtatatttcatgcccgattcttcttttcttaaacgggtcagcacatctttagagtggcacagtgacagctttcagagggaatgtggtcctggtacccttatcttgtgtggctcctacttctcacgctccatgtacagagtagagacagcctctgtttttctgaactattgaaatataaaccagggtgccagttgccccttgcagagaatagctttatatttgtctctctgttggcaccttgcctattccttatcacccccacttggtcctaagtgcctgttctgtcatggtggttgcagttaccactggctctaatctctcttctcatctatttctttgcctcttaccactttccctaagctccttgaccgtgtgtttctagatcttctctgccacagaaagcagtctctctttttttgcaggtgagtcacatggagtatattgagtgggatcttgaatatttcagttcttgatgtaattcatgtcaaatgttaagacatgacaggcagctgctgcacggggttggtttctccacggcatcccatcctacccctgttttctcatatgaattattctgaaagccttgaggctgatcagtgtagatattcctatattttggaaacactacttttaaggatcctagcaactgatttctccaacttacattgaaatttaaacaatttcctggtgcctcctgaatccctttaagatgttgcagtaagaatgagagttgtgtaggcggggaggtacattttatgggctttttataagaaatgatatcctgtgtcctgaatgtaccagtgcattaatgccatcctcatctgtagcaacagtaagcagccttttagagtggtataaatagtccattaggataaccataaatatttaactattatttactttagattccattggcaaagtagcagatttcttgaaaacctctcaggtttctcctaaattgttcttttcaaggcagtaaaaatgctatggtcccaaactgaaaataactgattattaattaaactactaaagaccaaaacaactttactcacattccacaggattggagagacaggaaacaacttgcgaggtttctagaaattgttattttcttgttaatggttattttaattagcaaagagagttttggaaatagttttgagctttacctgaaactgaatgactggaaggtaagtgcatttgaattatatttggttacatgcattaaaggataaataatttctcttttctcatgtgaagcttcattttggtagttagctgacttttcaggtaaggagaaggaccaagtaatcaccagctataaaatacaaacatttatcactggaaaacctagtaatgaaagcaaagcctatcaaaactttatgtttacagaatgcgtttaactctttttaatatattcatgtctatgtaatccttttgttacttttttcatgaaaacttatttaacagtatatatagttcatagtattgtgttgtggaatgagcattagactttggatatgtcaaatcctttccagagagagatggcctactcaaataaggataaataataaataggggagagacactttgtaaaactctgagcacagtgtaggtgaaccacagggcagtaacctgaggctagtaacagtggagctgtcaacaacctatgaccaaagggaaaagggaagaaaaaaggttctctagaacttgaaaggagctagttttgtgtagaaagctactgtacgtggaacagtgatctttagttgtggacatagccagcctaagttaaccttcaaggagggagccaagggaataaatatcccgatccccactcctccttccctccaattttgttagagctcactgtctggaacctgctgagcacctggacatgagggcctttgatagagtgcctgcaggtcttatggggaaagaagagcggaaagcggatctggagggagaaatgaaagataccttgaatactctaccacttttctctctatcaacctccaatcttgtcctccatgtggttgacaaatgcatgttcctaacacagggtatgcacaaaatcccatcaactaccatatcattcccatgatgtcttttactaatactgcaacctgactaaaatattggtccccagcaacactcttcatataaaatattgggagaagaggatgcaattaaggaacattaattatagctgcagctcacttctggagctggtcatgaggcctaaactgctcattatagggcccccccatcgacaataccttctgtatttaccttactgtctgacatcaccttgactggatgagtcattttccagttagggcaattgaaatcttcatttctttaagatctgagtgcttggtagtcttgtttttattgggggatcgttgctattttcccttgaccaggactatcgggaagggagtactaagaggcatcccactgaattccctgagttttaagcactgtccttgtcttcattctgtagcagaaaatcaattccccctgatcattaggtgtgattaccctagctagttatagtgactttctcatctctgttggttcagggccataaataaatttaaattgccaggagttagtctctacttccagtgaatcagaaaatgaccatgtttcctggtataagaattactgccttggacagtagggccatcaaactcatcaagtccaaggtttcggggacaggaggcaagaattctttttttttttattattatacttaaagttttgggatacatgtgcagaacgtgtaggtttgttatataggtatacatgtgccatggtgatttgctgcatccatcaacccgtcatctacattagttatttctcctaatgctatccctccccttgccccccaccccactaacaggccccagtgtgtgatgtttccctccctgtgcccgtaagttctcattgttcaactctcacttatgagtgagaacatgcggtgtttggttttctgttcctgtgttaatttgctgagaatgagaatgatggtttccagcttgatccatgtccctgcaaaggacatgaactcatccttttttatgtctgcatagtattccgtggtgtatacatgccacattttctttatccattctatcattgatgggcatttgggttggttccaagtctttgctattgtaaatagtgcagcagtaaacatacatgtgcatgtgtctttatagtagaatgatttataatcctttgggtatatacccagtaataggattgctgggtcaaatggcatttctggttctagatccttgaggaattgctacactgtcttccacaatggttgaactaatttatactcccaccaacagtgtaaaagtgttcctatttctccacagccttgccagcatctgttgtttcctgacattttagtgatcgacattctaactggcatgagatggtatcttattgtggttttgatttgcatttcgctaatgatcagtggatgatgagccttttttcatatgtttgttggccacataaatgtcttcttttgaaaagtgtctgttcatattcttcacccactttttgatggggctgtttgtttttttcttctaaatttgtttaagttccttgtagattctggatattagccctttgtcagatggataagattgcaaaaattttctcccattctgtaggttgcctgttcactctgatgatagtttcttttgctgtgcagaagctctttagtttaattagatcccatttgtcaattttggcttttgttgccattgctttttgtgttttagtcatgaagtctttgcccatacctatgtcttgaatggtattgcctaggtttccttctagggtttctagggttttaggtcttacatttaaatcttcaatccatcttgagttaatttttgtataaagtgtaaggaaggggtccagtttcagttttctgcatatggctagccagttttcccaaaaccatttattaaatagggaattctttccccattgcttgtttttgtcaggtttgttgaagatcagatggctgtagatgtgtggtgttatttctgaggcctctgttctattctattggtctatatatctgttttggtaccagtactatgctgtcttggttactgtagccttgtaggatagtttgaagtcaggtagcgtgatgcctccaactttgttctttttgcttaggcttgtcttggctatacaggctcttttttggttctataagaaatttaaagtagtttttttctaattctttgaagaaagtcaatggtagcttgttggaaatagcattgaatctataaatttggactgtatggccattttcatgatattgattctttttatccatgagcatggaatgtttttcatttgtttgcgtcctctcttattttgttgagcagtggtttgtagttctccttgaagaggtccttcacatcccttgtaagttgtattcctaggtattttattctcttggtagcaattgtgaatgaaagtttgctcatgatttggctttctgtttgtctgttattggtgtataggaatgcttgtgattttagcacattgattttatatcttgagactttgctgaagttgcttagcagcttaaggagttttggggctgagatgatggggttttctaaatatataatcatgtcatctgcaaacagagataatttgactacctcttttcctatttgaataccccttatttctttctcttgcctgattgccctggccagaacttccaatactatgttgaataggagtggtgagagagggcatccttgtcttgtgctggttttcaaagggactgcttccagcttttgcccattgactatgaagtgggctgtgggtttgtcataaatagttcttattattgtgagatatgttccatcaatacctagtttattgagtgtttttagcttgaaagggtgttgaattttattgaaggccttttctgcatctatcgagataatcatgtgttttttgtcattggttctgtttatgtgacggattgtgtttattggtttgcatatgttgaaccatcctcgcatcccagggatgaagcctacttgatcatattggataagctttttaatgtgctactggatttggtataccagtattttattgaggatttttgcgtcgatgttcatcagggatattaggctgaaattttctttttttgttttgtctctacctggttttggtatcaggatgatgctggcctcataaaatgagctagggaagagtccctctttttctattgtttggaatagtttcagaaggaatggtaccagcttctctttgtacatctggtagaattcgactgtgaatctctctagtcctgggctttttttggttgttaagactattaattactgcttcaatttcaggacttgttattggccttttcagggtttcgacttcttcctggtttagtcttgggatgctgtatgtgtccaggaatttatccatttcttgtagattttctagtttatttgcgtagaagtgtttacagtattctctgatggtagtttgtattcctgtggatcagtggtgatctcccctttaccattttttttattgtgtctatttgattcttctctcttttcttctttattagtctggctagcagtctacctattttgctaatcttttcaaaaaaccagctcctggattcattgattttttgaagggtttttcatgtctcaatctccttcagttctgctctgatcttagttatttcttgccttcagctggcttttgaatttgtttgctcttgcttctctagttcttttaattgtgatattagggtgtcaattttagatcttttccactttctcctgtggatatttaatgctataagtttccctctaaacactgctttagctgtgtcctggagattctggtacgttgtgtctttgttctcattggtttcaaagaacttatttctttctgccttaatttcgttatttacccagtagtcattcaggagcagtttgttccgtttccatgtagttgtgtggttttgagtgagtttcttaatcctgagttctaatttgattgcactatggtctgagagactgtttgttatgatttccgttcttctgcatttgctgaggagtgttttacttccaattatgtggtctcttttagaataagtgctatgtggtgctgagaagaatgtatattctgttgatttgggggtggagagttctgtagatatctattaggtcagcttggtccagagctgagttcaagtcctgaatatccttgttaattttctgtctcattgatttctctaatattgaaagtggggtggtaaattctcccactattattgtgtgggagtctaagtctctttataggtctctaagaacttgctttatgaatctgggtgctcctgtattgggtgcatatatatatttagtatagttagctcttcttgctgcattgatccctttaccattatgtaatgcccttttttgtcttttttgatctttgttggtttaaagtctgttttatcagagactaggattgcaacccctgcttttttgttttgtttttgtttttgtttttgttttttttgctttccatttgcttggtaaatattcctccatccctttattttgagcctatgtgtgtcttcttacatgagatgggtctcctgaatacagcacactgatcggtcttgactctttatccaatttgccagtctgtgccttttaattgggccatttaacccatttacatataagcttaatattgttatgtgtgaatttgatcctgtcattatgatgctagctgtttattttgcccattagttgatgcagtttcttcatagtgtcaatggtctttacattttgctttgtttttgccatggctggtactggttgttcctttccatatttactgcttccttcagagctcttgtaaggcaggcctggtggtgacaaaatccctcagcatttgattgtctgtaaaggattttgtttctccttcatttatcaagcttagtttggctgaatatgaaattctgggttgaaaattcttttatttaagaatgttgaatattggcccatactctcttctggcttgtagagtttctgtagagagagccgctgttagtctgatgggcttccctttttaggtaacatgacctttccctctggctgcacttaacattttttcctgcattccaaccttggtgaatctgatgattatgtgtcttggagttgctcttctcaaggagtatcttagtggtgttctctgtatttcctgaatttgaattttggcctatcttgctaggttgaggaagttctcctggataatatcctgaagtgtgttttccaacttggttccattctccccatcactttcaggtacaccaatcaaacgtaggtttggtcttttcacatagtcccatatttcttggattctttgcttgttcctcttcattgttttttctctaatcttgtcttcatgctttattttattaagttgatcttcaatttctgatatactttcttctgcttcatagatttggctactgatacttgtgtatgcttcacgaagttcttgtgctgtgtttttcgactttatcagatcatttatgttcttctctaaactgactattctagttagcaattcctctaacttttttttcaaggttcttaggttccttacattgagttagaacatgctcttttagctcagaggagtttgtttttacccaccttctgaagcctacttctgtcaatttgtcaaacttattctccgtctgattttgttcccttgctggtgaggagttgtgatcctttggaggagaagaagcattctggtttttggaatttttagcctttttgtgctggttttccctcatcttggtgactttatctacctttggtctttgctgttggtgaccttcagatggagtttttgagtggccgttctttttgttgatgttgatgctattgctttctgtttgttggttttccttctaacagtcagacccctcttctgcaggtcttctggagtttgctgggggtccactccatcccctgtttgcctgggtatcaccagcattggctgtagaacagcaaagattgctgtctgctccttcctctggaagcttcgtcccagatgggcacccatcagatgccagttggagcccttctgtatgaagtgtctgttgagccctgctgggaggtgtctcccagtcaggaggcacaggggtcagggacccacttgaggaggcagtctgtcccttagcagagctcgagcactatgctgggagatctgctgctcttttcagagctggcaggcagtaacgtttaagtcggcggaagctgcgcccacagctaccccttcccgtgggtgcactgacccagggagatgggagttttatctataagcttctcactggggcggctgcctttctgccagagatgccttgcccagagaggaggaatctagagaggcagtctggctacagtggctttgccgagctgtggtgggctccgctcagtttgaacttcctggaggctttgtttacattatgaagggaaaactgcctactcaagcctcagtaatggcagatgcccctccccacaccaagctcgagtgccccaggttgacttcagactgctgtgctggcagcgagaatttcaagccagtgggtcttagctttccaggctccatggaggtgggacccgctgagcaagaccacttggctccctggcttcagccccctttccaggggagtgaatgattctgtcttgctggtgttccaggcaccactggggtatggaaaaaaactcctgtagctcgcttggtgtctgcccaaacaaccacccagttttgtggttgaaacccagggcccttgaggtgtaggcaccctagggaatctcctggtctgtaggttgcaaagaccttgggaaaagcatagtatctgggctggagagcactgtccctcatggcatggctcctcatggcctcctttggctccaggagggaggtccccggctccttgcacttcctgggtcctcaccctgcttctgcttgccctcagagggctgcacccactgtctaaccatcctgaatagatgaactgggtacctcagttggaaatacagaaatcacctaccttctgcgttggtctggctaggagctacagaccagagctgttcctacttggccatctggcctgtcagtaagaattctttaagtggtgtattaggcataaaaataagatagattactttatttatctgtttatttatttagagacaaggtctaactctgtcgcccagctggagtgcagtggcgcaatcatagctcactgtaactctccttcagcctttcgagtagctgggaacataagctcatgacaccatacctgggtaattttttctttctttcttttttttttctgagatggagtctcactctgtcacccaggctcggctcactgcgatctcggctcactgcaagctctgtctcccgggttcacaccatcctcctgcctcagcctcctgagtagctgggactacaggcgcccaccaccactcccagctaattttttttattagtatttttagtagagacggggtttcaccatgttagccaggatggtctcgatctcctgacctcgtgatctgcttgtgtcggcctcccaaagtaatatattttttgtatagacgaggtctagttatgttgttcaggttggtcttgaacacctggcctcaagcagtcctcccccttggcatcccatagtgctgggattactggcaggagcccctgagcctgacttataccccttttactctcacctcttggttcctggatttgtgcattctctacagcagagatgacaccatatacttggctgcccaacctatgaacagaactccaacctctcagggtgttatctcttggcttgcaccctggctgaggcttcatcaggacatttcatcattctgtcaaactggttgctactagagggtgcaggtgatgtgatccatgaattatatgtattgagcccactgtctcacttcctttgctaaaaaatggttaggagatagttttcacaggaaaccttggctatatatcagttgcactataagtccatgaatgatggtgcttgcagaggcactgaaggcagggaagacatatattgtatatgtctatctttgtgagtccaagagcatccccttataatgggaggaatccagtggaatcattctgctaccacatacagccacctggtcctcttgccctgttggacagtgatagctttttgggggctcagcatcagccttggcttttgaagtttgggacttctttagtgctggaaagccagattccccctggtaggagaagagaatgctgaacctatatatatcctccctctgcaccactctgtgctttatatgtgggtccattaagcaaacatttggatggttgatgaaggatactgagtgacaatcagattttcttgttcactttattactgaagctatcctctgtgatggccttttatgagatttagtggaatagaattagattcacattctgtacttattaaaagagactcttccatatattcttcacctcctcctttgtgtccttcttgtctgtccttatctttctcctccttttagtcctcttcctgctcctcttactcatgcttgctcgtttccttctccttgttctccctgttttccttttcctccttctccacatgctccaccttgtcctcctcctaatcatccttctcttcatcctcttcctcatcctccttctcatcctccttatacttgtcttcctcctcctcctcctcatgctacttctccctttccttgtgctccctattcccccaggcctcctcatcctctacaactttctcctccttccttaaactgttctgcaataagcccatttgttttctccattttaatttctaagtactttttttgaaaaaaattttgttttttgccctccaatttatgttgggattcaacatagtctccctctatttttttaactttggtgcatgatattctttctcccccattctgataacactacacattgctttgacttccatccccattaataactaagtgaaaggtgttacaagtcttgctgaagattacacggtaattcttctcacagccaagcttgaactcagttttagattccagacttagtgtcttttcactaggctgaattgcctcatcatggctgaggatagaaatagcctcatatttagagtaaaactcagacaagaaagcaagcaagtgaacaacaataacaatagaaaacaaaaatttaaaaaggaaagagagagataggcatattcactaatttaactacaggaacttgaatttagtgttctctctgctcagtgatttaattctaggtgaattaaaaaagaagtttctgtgaaggtttgctgactttggtttgttccaaaactattaaaaatgtataactcttacctgctcaacagtatcatttgggaccaaagcatgaggcataataaatagagtcaataatatctgtacttagaggtatgagaatcattcctgatatattaatttaatttcttctgtaaaattaagggtgtttgtatacagactctgtagtgatatcaggtagtcaagacttggttttgtagtcttcttctgaagtcatcacaataaggaaattttaaacatgtaattagacaaattagattggaagatgaaaacaactgctttaattcaaaataatctcattaagtatatcacggcattaagttttacaaagcccaggtcacttcctctgtggctttccctatgaccacctttgtttctccttcagctgtaattgcttcccgctctggggcattttttatgcaaactacccgatccacctgtgctaaattatgattgtttattgtgttgtgcgtttaagatacagctataaaataaaaagcccacattttaagaaaagatagaattttttatgcggataagctttgtttcttaaaataaaaaagatttgatacttactcaatgttgcatcaagcgttcagaagagttttctgagaggtggggaagtctccttgcgaattaccttcagatcctattacagagaagaattcccatccccgatatgtgtgtagtagtaaagcactgttgccaaaaatgcccattcactctttttttgtatctctgggtaagtttaccaacctttttgtgctttaatttcctcaactataaaatgatggtaacagttgtactttcctcatagaattgttccaaatgaattcggtatttgaagtgcttagaacagtgcctagcacattataaatgctatgtgcctttgctgttactatttctactacgaccacattggtgatgacaatgatgatgaatcctattactaacagtttcccattcatttcatattaattaaaaaaatatttgctccaaatgcttttatctgtgcctacaaacaaacaaaaatccaaaggtgcagatttgccactaacgaaatagtaaagagatgtattgcaggatctaaggctgattctgaaagtgttggtccccaaagtgtttggagtggtgaagtgatattggagtaactgtaaaacctcttagatggttgctctgaagtaagcccctctctgttggatatatattgcatgttttttttttaatgtatccatatatattatgacttgtttctccaatgtaaatacacttcttgaagacagaagctgtgttttccatttctgtgtatttcctatagcattcaacagagtgttttacaaatttcagaagttcaataaatgtaatgattagctgcttaggtagaggtgagaggaggagaattaggaataaaatgttctccagttaattgcaaagtgcttttgtacttaaaaatgaatttgcattttatctttttctacaacttctggaaagtgttttagttggcatttgtcatttgattttgtacaattttgtaaattttctggaaatctaaattcctacaaagagtccatcacaggattttctattttttaattgtttctacatgaaaggaagtgttagtgtaaaggctagcctgttccatttacacttcatgcaatttgttaagaaaataattaagctttggagctggtagagaccatattgttacagcctaaaccctccacagggtacctggaacagaatggaaactcaataagttgttgataaataaatgaatcatttagtacaatgtcttcatttcacagttgaaggaactctgtgataacttgctccctgtcacatggtggcataggaggggttagaacaaatgttgctgatgtcattcatcatgctctagttgtggatttcacatttaaattgtaacataaaaaagactttaagtttagtctttgaataacttccttcattttaaatcttgtgtataaataaatttcttaggttaatatctgctacattttagaaaggcagtaggaagaagtttatacaagtcaaaagaattgttttaaagggaaagtaaaggaaaatatctgttagtggcttattcgaggtgtgtcagttgatgaatttcctttctctcaaccataagttttctttgctctgttatatattattagggtttcctagttactctaaaagactttctgttggaacaatttgtttttctcaagcacaacccatctccaacttgtctgtatttctgagactttcaagaaatgttggttatcattttaattgattttctgctaggatggaaaaaaagagccaagttcatgtacctgtttgaaggggcccaaactgtcagaaatagggacgattgcctggatgataacgctctgcgatgccctccacaatttcatcgatggcctggcgattggggcttcctgcaccttgtctctccttcagggactcagtacttccatagcaatcctatgtgaggagtttccccacgagttaggtaaggagctctgttcatattgtaaaagtctgcttacttcttgatttcagtggaatgagacttttcaggtgacatgctcttaaaatccttctgatgcactaaaatgaagaccttgttggacattgatgattatctttgatatcatccagaaataaaaaaaaaactattcacttgatattttcttcttcttcttctaggagactttgtgatcctactcaatgcagggatgagcactcgacaagccttgctattcaacttcctttctgcatgttcctgctatgttgggctagcttttggcattttggtgggcaacaatttcgctccaaatattatatttgcacttgctggaggcatgttcctctatatttctctggcagatatggtaagaagcttaaaatttgtattttcttttaatttaaaatttggaaatgagtatctggattataagttaactaagggtggccttctgctttccgcagtgtggaaggcctttctgttgtaattcagaacaatcccatttcaacagatcattctacttgagtagtttacactaatagtaatttgaaactgatcctcactggttctttaaaacataatcgtattgtttgaaggtgaaatgatttgtttttgctgaaatagagatattttcctctatctctattccccttgtggttggtacatcttgtcttatgttatagtatgtccctataggactttttctcctttttctccctcttttgtgtctatgccacatttggaagaggaataacttattagagtaaatagcattttgttatttcaaagttctaaacagtgacagctttttgggttaaactaaaactggtacactaaaattggtaaaattttgacaatagttatttgacatagtatatatttatatctgttcaatgtctgtgtctttgtatctgtgtgtatgtgtgtgtttgtgctcaaaagagcgtgcatggccgggtgcggtggctcatgcctgtaatcccagcactttgggaggccgaggcgggcggatcacaaggtcaagagatctagaccatcctggccaacatggtgaaaccctgtctctactgaaactacaaaaattagccgggcgtggtggcgggcgcctgtaatcccagctactcgggagtctgaggcaggagaattgcttgaacccgggaggcagaggttgctgtgagccgagattgtgccactgtactccagcctgacgacagaacgagactccatctaaaaaaaaaagagtgtgcatgtgtgtgtgtaagagagagaatatcctgtgcattttaaaataaatcatggaaatctttctataaaatgataatatggtagtgtatgaaaatcaaggactatttcttttgcatttggaactggatgtattacatacataatttaataatttgagttttttatttgcattcttacctccaaattatatttgtctagctctgttcgttgttctctgcagaccctcagaagagcaaggatttcatctcttagaaccaatgctacatttataacttttgtcacaaaattaatgtctcatgctatcttatagtcattttactttctgatataagaatggaatcttactagagttgttcagtttaaagaaataatactaagaaataatactcatcctggagtgagcaaaataggcacagttcaaggggcttttccattcatggggcttttcctctagaaagaggggatccttaaattaaacaacaaaaaatcacacagatgactaaataattacaaataataaaaaatgctatgaaataagagagaaagtagaatatatgatgagagatgataataaaggaatctagaataaactaggattagctagcaaaagtgttttagcaagatataaggtaaaacgtgaaggatttagtccactgaaaaattagagaaatacaagttctggtacaggtgatggtagatgtgaagattttgctgggtaaacttgaggtcatgaaagaatgggttgggtgaagcatagagagcaggtaatggaaaaggagaaagagaacataaaatgaggtaaattccatcccactgattgattcagttggagaaaaatactacttcagtacttttactcttgttgatgcctgaaagaactagatattcctattaagctatcagtactaaaacctttaaacatccaaagtaaatgatcataccacccctcccagcattctattacaggagcaccttgttttattgcacattgctttgatgcactttgtaaatgctaggttttttgcacattgaaagtttttggcaaccctgcctcaagcaaatctgtcagtgccattttttgaatagcatgggcttatttcctgtctctgtcacattttgttaatttttaaacgatttcaaaccttttcattattattataatatctgttatagtgatttgtgatcagtgatctatgatgttactattatgttttgggacgccatgaaccacattcgtataaaatggtgaacttaattgacaaatgttgtgtgtgttttctccctgcacccctgatcagccatccttccatctccctctccttgggcctccctattccttgacacccaacaatgttgaaattacaccaattaataatcctacagtggcctctaagtgttcaagtgaaaggaagagctgcacatctatcatattaaatcaaaggcctgaaatgattaggcttagtgaggagggcatgttgaaacccaaggcaggccaaaagctagactttgtttgccagatagcccagttgtgactgcaaagaaaggattgatgaaggaaattaaaagggctactccaatgaacacacaaataataagaaagcaaaacagccttattgctgacatgaataaaatttacgtggtatggatagaaagatcaaaccagctacaacattccgttaagcaacagcctatttcagagcaaggaataactctcttcaattctatgatggcttacagaagtaaagaagctgcagaagaaaaactggacattagcagaggtgtattcattaggtttaaggaaagaagccatctgtatgacataaaagtgtcaggtgaagcagcaagtgctgatgggaagctgcagaaagttatccagaagatctaactaagatcactgatgaaggtgactacactaaactaatagattttaagtgtagctgaaacagccttctgttagaagaacatgccatccaggactttccatactagagagaagtcaatgcctggtttcaaatcttcaaaggataggctgactgtcttactagggactaatgcagctggtaactttaagttgaggtcagtgatcatttaccattccccaaatcctagggcccttaggaattatgttgaatccactctgtgctctagaaatagaacaacacagcctggatgataacacatctgtttacagcatggtttagtgagtattttaaacccactgttaggacccactgctcagaaaaataaaagaaattcctttcaaacattactgctcattgacagtgcatcaaatcacctaagagctcttatggagatgtacaaggagatgaaagtttttgtgcttgctaacacaacatacattccgcagtccatggatcagtccatggagtagttttgacttacaaatcatatcatttaagaataatttgtaagtctctagttgctgtagatagtgattcctctgatgcatctgggcaaagtaagttgaaaactttctagaaaggacttatccttctagatgatatgaagaacatttgtgatttatggaaggagtcaaaatatccacattaattgaaattggaaagaagctgatttcaaccctcatggatgactttgaggtgttcaagacttcagggaaggaagtaactgcagaggtagtggaaatggcaagataactagaatgagaagtggagactgaagatgggactgaattgctgcaatctcgtgattaaactagaatgaatgaggggttgcttcttacggaggaacaaacagtgatttcttgagacagaatctattcctggtgaacattgctgaaatgacaacaaaggatttagaatattctataaacatagttcataaagcagggacagagtttgagaggattgcctccactttggaaataatttctactgtgggtaaaatgctgtcaaacagcattgcacactacagagaaatctttcatgaaagaaataaattgatgttgcaaatgtcattgttgtcttattttaagaaatttccacagccactcccatctttagcaaccactactctaatcagtcagcagccatcaagatggaatcaagactccaccagcaaaaagattacaactcacccaaagctcgaatgattggtagcattttttagcaataaagtatttttttaaattatggtatatacattgcctttttagatattatgctattgcacacttaatagtctacagtataatgcaaatatatctattatatgcactgggaaacctgggaattcatgtaacttgctttattgagatgtttgctttatcacactggtctggaaccaaacccacactgtctccaaggtatgcctctaagtgactgttttgtggtttgccacaagatggcaacagttatctaacaatatatctgtcttctagtttccagagatgaatgatatgctgagagaaaaggtaactggaagaaaaaccgatttcaccttcttcatgattcagaatgctggaatgttaactggattcacagccattctactcattaccttgtatgcaggagaaatcgaattggagtaatagaaaatggaagatggtgttgttaataaaggcatttaatagataaaaacatctccaaaaaggattttgaagctgatcctatttagttaaaaagataattttgctttcaactgtaggtccagaaaactaattattggcatcagtctgtgaaatagtccattatttgttgttaaaaatgcttcaaaaggttttcagtgtcagtctgagatgcctggtatataggagcctttgggaaatacctatttttcagtattccatgcatattagatatcaccatgaagcaagagacatgcattctataatcatgtagacactcagactcaggggaaaatacaagttatatcctgaaagcctttaaaactctatggtaggatcaaagattcaaatggtttcagagaggttttatttcaattaatttgttctagtgctttcaagagcaagtacatcaaaatgtagaaggtaaaatgtatgcaacactaatataaattattccaagtctttaaggagccaaagaaaaaaaagatttctcacagctttttgttctgttttgtatttcaattaggaacttgcagtattattttgaaaaccattctaaaataataggagttaggaaataaataaagttttgctagccctgctaagttcaggcttagaggcttatcgctaagtataaacttcaccagattccacgaaaagctggatagctttttttctgacttatgttgtggttgcacccctcacaaatggcagaacagtatgtaaagctggtaacacctcggtttcagtgcaccatgtgtttgctttgtgaaggtgaagaatatgttggtttagagaaagaaattggatgtaattttatgcaatttacttttaaagacaaacataactatttagcagagaatattttaataaatgcaaaacaacagctggactgctgtacatcaaggacagattaactggaaaacatatgttccttatgtgtgatcgagagccattcagaaaagacttcctttgtgttcagcctatacttttccatatggtataccttgaaaaaaattagcacaccatggttatttttctaccttttataaaagacagagcctgtttactcatttagaagatagagaaaattggtctaaaattgaacatcctagattcacactcccaagtcacttaaggtgatttgatggtgaggaaaatgattgacaaagcccaacaatgatctcaggaattacattttccaacagaccaaaaaatgttttcatgtagcagcaatgcagatttggtgaatatttaatatatattttagtatgtatttcactttatgactgacaattaaaaaatattgtttggccaaatagtaaacacccttttgaaaccatgtattgtgtcatttgttatttaatatttgtcctgttgagtgactaccatgtatctggtattatgggggagagatataaataggaaatcagtgatgtgctcaaactgtaaatctaaccccgccatggcttatttctataccagttgcttagcatggccaacccaagagtcgacgattttaatagtctctgaatagtattatgatgatctctcgttacttagtagggccctacctagtagactgtttcgctttaccacatctaaaagggtttctttaatgaggtgcttaaatttttaaaaagtgaactagttgagaagagccaaaacagcaccacgagtttaccagacaattaacataggcatatcaacagctgattactgatggcctgtgccaggggaaaacttccagtctgtcctccatgctctggttggcatcatcttcctttaggtctcactttggagaccagacttctgtgctcatttaaggtccattacggtacaagaggttaaccctataataaataaagattctccaacactgatgttactacagcttctttctcactgatactttgccttccatacaactgtgggtggcaatgtctgtgttggattgcttttccttagcttcctttctgtgccaggtatgcacaaggcattctctcatggccatttctcttccacattgggaatttccagcttctggatggtcccagaatcagtgagtttactagtaagatttcaggcaagctaaggcagctggataaactgaagactctaaatacctgtttcattaattctaagacatgcatttccccaaatggtatgctgtaatcactgacagctgggtagcattgtggaggtagttatacttgcctgaaaatgaaaatcatctgttgcaatctggtaaggctaagaaaatgccagtagcactgtgtttaggatttgatggtgtatagtaacaggattatctatgttaggtttactttccttcttataaaacaagtgtggaaggagcagtgcagggttggcatggcagtcccatggtggctgggaacccagactcctttaatccattagctctgccatctttaacttgtgactcccaccttcaagattgcttcatgctctaagatggttgctacagattcagccttaaggtctaaattctacatagaaggaggaatgggtagaaaggcaaaaagttcaaactcagctcttcctccctctttaaagagccttttcagaagtaatagccaataatctccacttgtattcaatgaccagaattagtcacatggccataccaatcttcaggagaagctgagaaacattgcttttagctggatacattaccagcaataaaatcagaattctcttactgaaaagaagcccagactggatatcggctgtctcaggtacagacaggcttgtatcagtttaattcgtaagcttattactccagatggttcttatgcagccagtttagggaactgctttttgtagggattctcatgacttgtttcagatcaatcccttgtcactttaactattttaattatactggcccatctgagcagtctttcctaataaccagtatttttctttacacacttgaactacttgtcattatagtttctctgccttagcctcctgtgagtactatttatttaccttgaagaaatcctatgtttttcacaggatgatctatattctaaggaaacggaaacaaaactcttttctatggactttgatctttctgtttaaagctcttctgattactggagccacatccagaattatgaaactaagtactattaacacatactggcaaaagtaaatttaaaaaaccacttatttctccccctgccccatatgggttattacagccagtcagtgcaagaaaagttggatctgacatccaaatgtggtaaagcagaaacagtctgctaggtagggccctactaagtaaccagagatcatcataatactattcagggactattaaaatcgttgactttcgggttggccatgctaagcaactggtatagaaataagccatggcggggctagatttacagtttgagcacatcactgatttcctatttatatctctcccccataataccagtttgttatctgattcttgtagataatcaaatgggctactgatgacatcaaatctcaacttcatttactttggatatatacggtaagaataacaaggaacaattttaatgggtgggcttgcatgttttaaagtttatacaatggcttaattccttctgcagtgactgtgcatgttattcccacaacagtatagaccaactggtagtaaaaccccagtgaggcaacacgtggataatttattgccaagcttatggtcaccaacaggatgtttgcttaggggtcataggaaagaaaaataaagatgaaaagttatgagtacagggggaaatctccttggaagaattcaaatgggaaattcttccctctctcaaaaagctgaggaagtttataaaacttgtttcagtctgtattttgtggcaagctccattagcagacctcacagacactgcgggtggtgtctgtagagaggctcagaggaggtctggcaagtgcttttgcaggtgaagtgaggagagttgttgctaccccagcttgaccttcagtcgtagagtttgttgggataaaaggtagacgaatattcccatggtctagtgtgagccgagtggtgtgtaagttctggtttggaacaatttaaaatcttgtgtaagaggggtactatcttgaaaatagaagaaggtcagtactgagtgaacttctggaaaaccaaggactaagtcatgtggggcaattggagaactagaatacatcacttggcaggaacccctctgaagaatcccaaaagtgtctataaaagaaaggttagtcttaagcatctgtcagacagacagcattaagcaacattttgacagtatctgtcaagtatgaacttttttatccccttttctttccttcatctgagcacttaaccctggaagggccaaaagccaattagtgaacagtggggagtaaggaaataaaagagaaggattccttcccagaagtcttacctttgaatacaaattgaattactgattgatgcattggattggacattttcaataactgacttgagactatgtttgtgtcttgaagtaattgtaggattttatattccctccaaagtcctgtgtgagaacagccattgtgccaccccaagtttcatccaggggtaggagaagggctagccagtccttcactcccaagcagacagtgaggaataaaattaaaagttgtttttagttacccctgtgagaactgcatgttaatatactgattatatctgccctttaaaaattagtacttacacacacctgtagtcccagctactcgggaggctgaggcaggagaatggtgttaatcagggaggcggagcttgcagtgagccgagatcgcgccactgcactccagcctgggtgacaaagcaagactccgtctcaaaaaaaaaaacaaaaaacaaaaaacacttacttacaacaaacctgtgtaatgggttctatttttaatgctaggccaggctgcagctgagaagttgcaaaggaaccccatgctcagggatgcagccagggaagagcatgacaaaagccctcccacccacactgctgacctcttgcagcagctgcaaacagcaggagagccctttcctgttgcagtatccctccagcgccctctactgagacagctcaatatcatgctcactgtaaaggatgggtgctaaaggaattctgttcattatgacagagcatgtatttagagtgaatttggagttcagtgttagtaagttggtaagtggcacagggagacattactccgtgactaaatgacatcactctgtggtgatgggacttcgtgcatttgcaatgttggggacatagacttttcaactgtacaggatggggatccactctccacccttctgtatcctgctttttgcctccagagactgacccacatggacctcagtgggtatagccaaatggagaacttcgacaagagactggaggaagtgaagagaggaaggatagagtatcaatttccttgactatcctcctactgggtatccttgggctgcctgttttgcccaagaaggccttctctacagaaaagcttcttacaatatctgtggctaaggcccagcttgttttccttatttccaatttatcaatagctggcacttctgtaaatagatagaattcaaagaaattactagaaaaatgaaatacaattaaaaataaataaataaattagctgggggtggtggcggacacctgtaatcccagttattcaggaggctgaggcaggagaattgaacccgggaggcagaggttgcagtgagccgagataatgccactgcactctagcatgggtaacagagcaagactccatcttggaaaaaaaaaaaaagacatagaaaatccaaccccatttttattattagataaacctcattttttattagacacaattattctttgggattactgttgaagtttataaatgcttattctcaatttccgtacctagttcatctaaaaaactgttgctgggccagcacctgcctgtagattcccctcctttggttttggtgcccactatctctctgtccctttggcctaggggtagtaacagctctactgtcttcagccctgcgttcatgtagcatcacctgtggtttccctgcaccccacttgcatgtttgtaatcagtccctttgtaaattaatggacctgcctcaccttaccctcatttgagcatggcagttctttgtttcccctgtggctgtgattatcagcagtaaacgtcttatcctggaagaggaggtgactgtgtgaatttggcaggagaaggaatacacaacaagtgcgtatatgggagtgaagttgctgctcactgaaagcaaggagaaaatttatggggatgaaagatgataagccattatcattaaacattttagggtaacaagatggcattaggttagattaatttgtatgattaactatgcatacagagaaaaatatctaggatgttttgagagactagttataagtggacttatcacatttctggcagataagaatcttttgactagataaaagactgtaaccaactgtccaacaacacgtccttaagcatgaatcatcacgtatttttaaataaagacatagatttctagatagggaagaatgaatatatttttatgattgtttattgaacagtttatgccttatgggaatccttctcgtgtagatgtatctataggtcacattccctcacttaaagcatactatgaagtgctacgtggaatatctgagtgagaacaccgggactgctgcttgtgactgtattgctgagacgttccacccattcacagcaatgcttataaatagacaatgttttttctttgggagtcattgtatgtgctaaccttaatggtgttactctaataattatgtacgagcttgttaatgaactgggaaacattgattttagaagcttagaaactgtggaggaaggtgcttcatatggatctttctactttttgtatcttttgtgtttccatgaaaaaatcttttaatttgtgaaaagtaagcctcagaattcatgtctaagcatttcgtagaaggatgcacgtgagaaaaagcacctgcgctgtcatagcgatcctttggtgttttaagatgaaaaagttcaaagcattttagaatagtcataaagatgacattgtataagttaggagctgggttgtcctgtcactttgtggtgacaaaactggtgaaagtggtattaaaatcattgctggatatgtttggagtaatgcacttctgttgattgtttctgcataccttgacttctgcccttgtccatgtaaaagcttcactcttccttttagaaactggtttctcccaacccctactggagattgtcaaccaatgcacttaacctcacccatttgccacaagctgggcaagtcacccagtctgggtcaattgtaatctttacacagaaacttctaaggatgtggagagccaaaactcttgcctcttgtatttgaccccagagcttctggtggtcatgttcctggcacaaggagaaacccgggaaaatgagatggatgctgagaaaacagtagaagctatggggactgattggagagagttgtgttgtctttggttctagttcctgacatccttagtacttttcagttatttttctttagttccttcaattttgtaagttacccaagttattctagtatctcagtatgtcctttttggctttaactaatttgatttgggtttctgtttcttgcaatacaatttttctaattaatacagcagttaaatattgagatatttatttcaaacaaaattcccagctcttgaatttagcaaagttcctcagcactttctggaacttcactatcaatgtcaggagtcaacttcctaggcagagtatagtaaaatctctattatgttccagtagtggtgagcaaaaatctttcaaaactcatggataatttctatttatttttatttcactttggaatacatagaaacattgtacatattttactttttttcacttagcacaattaatacatcaaaagtgaaggttgttcctcagtgacaactatgagagggtaactaacatttgatgccactgaaaagttttggagccaaaaggggcctcaatctataacctaaacaaccttgagttcagaacaaataatggtgttgaaataatattctatgtatagaaccatatgatttttaagagcaggagcaggataactgagggaataacttatataccttgacaagccatgcaaaatcagacttcatagataactccaaggaagatgtttaatgtaggatatgaatctaggctacacttcatacatcatgttttcacagaaaaatgcagtttcctagcaaccatcacctggttgtcaagttattatttgatttttacagacatctggctttttaaggcacatgcctcactgatatgtaagcataatatctaggttagtgttgaaataattatatttcactttcttccaaataatacttaaaaattaattgttcaaactttgcctctttttgaaattatgataaaccattgtagggaactatggtagagaataaggaaaaaaattctgagcttgttcttctgtgaatgaatgaatgaattcatttgttcaataaaacacatattcaatgtctactgatgctaggcctggagatataaagatagatcagagctcatctctgctctcaagggtatcatggcatgtggaaaaccaatgatatcacaaatcagagtgttatgttagagaacatggacagtcagctcaatagtaattgtgcacaaatgggagaattctccttaggttggaggaggagtcagtgaaaaatacttcacaaaggaggaaacatttgactgtttgacttgggtttaatgaataacgtcgaattcatttctgatcagacctcttctctcctcccatgactggaaccaagagccttttcctgtggtttaacttgagctggaactcttttgcaattaatgataccaaaagagaactgtagagtgtaaatatgtgttgggggtaaggtgttccagatagttgtgattaataacattaccacaagcagaaaggaaatgcaaacaatcaaattaatactaactgaagaaaggcaggctactcagcggtacgcacactatagccacactttttgttatatatgtatgtatgtatatataacatatacatatgggaaaatattttctagtacattagtaggggatatctcgatgggattatgaatcattttaaattggttctttgtaaaatgttaatattgtctcaatttttttcaataaacacgtacttaccggtaaattagaagggaaattagaagaagtcttggtgggatttttgaattattcaaaatatattatttttaatgctttccaattttcttcaatgaacatgtattctaaaaaagctaatagatgtgattaggaaaaaggagaaaagctaacaacttagaggactgaaagattacggaaacatggtaactcacatgcttaaaactttactatgttccttctctttgtctgtcaggcaaggtagtaatttcattatctggagtatttcacctccacatctctgcaataccagcaccttcaacagtgattggttagaggttggcatatgacatagttatgaccattgagacgtgatgctgtgtgtgctgtgaagtttctcaaaaggagtaaggaagatacagcctcttctttctagggactttgtttgtaggtgtgacacctggagcagccattttgctactgttttgtttctaattgtgttccccgccgccctccccgctcgccccgaaaaacgacatgtttgagttctaatccccagtatttcagaatgtgaccttatttggaaatagagtcattgcaaatgtaatttgttaagatgagctcatactggagtagagtgggttcctgatctagtatgactggtattcttattaaaaagagaaatttgaatactagctacaccatgtaaagatgaaggcagagatcgtggtgatgcatctacaatgtcaacaattgccagcaaatcatcagaatctgggagagaggtatggaatgaattctctctcgcagccctaagaaggaaccaatcctgtgcacacctgaatcttggacttccagcctccacaactgtgagacaatacatttttgttatttaagctacccagttgtggcactttattactgcagttctagccgactaatacagctaccttgagaggaaatagcatggggatgaaggtgatgtgctgaagaagcacagcagaaagtggaaagatggtccatgaggacatccttagccactgaattgacaagcctcttccctggagtccctcttccttgggattttttttggtgtgtgtaataatcacttttcctaatggtgcaaaccattgtgagttgctctttgactgctagtaattaaagcaaactaaccaagtcagccctccccagtgttcctttttgcaatctaaattctgatgtccaactcctccctgggccactccctgtccccagatgtctctttgtatatctaaagaagaaaaagaaggataaatcctttttctcccaagagatctccctgcttttgtgaaaagcacaaagaagggcattatctaacttttctcatcattagaagtcaagcctggccgtgactcccgttatgacattttgatggccacattttatgagaaaagcccaaacagacagacctgtctgtaaattctttcatcctttgcattctttctttgactgtaccttagagagtgtttgattattgcaggggagatggaaaagaagcaggttctggcctatgctctagttcctcactttctggagttatcttttgggcctggagtctcttggagtgaggaaaggaagccatttttatactttacttatggtagagttaaacttcgtactcttaggaggctacatgcaatctccaagaggaagagagtgaagaggttaagaattatgccatcaaaatgtgctgctctggcatattgactatttgaattacagatattttaaaaacatcagatatgaagaggtcactctgatcttaattctgtgtcttaacagcaggagatgaaattcccacatgggagatggcctccctgtcacagaaggaataccattctccctatcaatgatgagaaattggaactgagagaattctgtatagaccttgttcaagtaattcttctattttaaacctccccacataatttagctgccttttcaaaactactgtcctttgtgcaaccagtatagaagcgattgactctcactgcatccttgggtcttcttttccctatatgggctcttttcccatatgggctcttatgtcctgtaaaacatgtattaaataaatttgtatgcttttctcccgttaacctgtcttacatcaatttaattcttgggcccaggtaggaccctaagaggacagaggtcgagttttgccacctctgcaagagaaaagagagatgcccagaccaccaggcctgggaaatctttgatttcccaggctttgaagtgggcactgtgtctgaacctggccctctgaaacttcctgttcctggacatcccagctgctaatgtgagttgcccttgcactggctcagggctgggacattaaaggaatttcccttttgttgacataacagtaggatggctatagctaacaataatatattatttagtttcaagtagctagaaggaacatatgaatgttcccaacacaaagaaatgacaactatttgagatgatggatatgctaataaccttaatctgattcctatacattatatgcatcacatatacatacattatatgtataacatcactatgtaccccataaatatgtgcaattattgtcaattaaacaaataaatttaaacaaacatt

SEQ ID NO: 148 - DNA, 8349 bp, Homo sapiens
gccgctgcgttggcagccctgtccctgagcggaacgcaggtcgtctctgggaggaggagcgagggttggacgcagtggccgctgcggtggcagccctgtccccaggcgtggactctgccctcagcttcacagtcaccgaagaaatgaagttacaggaggggcacaccgtccttttgtctctgcctttgaggttggcgggaactgaaactggtacggtctttttgaatagaaatttggggtctttctggcgacgtaaaactgtgtgtagtttgcagtagagagtgttgagaacagcctgtccgggctgtgcattgagaaggggcggttaaaatgctgccacgtcgtgcagcccataaaagggggacacagagtagccgaaactgctcttgggggagggggcacgtcccagccttccgtgtgatgctggggtcagcgtggcccctcggctgccagagctcacgaagacggttaaggaaagcttcccccgggtggctttcaccccacggggacagagccccagatgggcccagggacctctgagcagccgtgggccatggggtgacagttgggggttggtgggacccgtggctgtcatataccctgggtagacggtggcttgtccaggcagagatgcccaggggaagtgggtggcacctgagggcagatctgacttttcaagagaagctgaaaacacgggtttttctgtgaaatctctagattgaaaacagtgggcttgaaaagcctggagcagagggagtgaggcctgccccccaccccagctctgcgggcacaccctggccagacagccctgctccagacccggcctgtgtctcagggtggcccaggaggggactttgcaaggtgacgtggggcttggaggtcccgtttccctgtaagcctgggtacttaggggatggccctggtcagactccaccagtcccagacttgggggacacgagaagggagatgggccacccagttctggttgggctggggtggggcttctgaggggtggggaggttgtcccttcccacccacctgcccctgccccaggattctcggctgtgagcaggaggatgtgtacgatggccaagttgcctggactgggtccgcccctcctggggctgtgagtgcacaggacactgggcccacaggcacctctggggctctgtccccgtggggtgaaagccacttgggggaagctttccttaaccgtcttcacgagctctggcggccgaggggccacggggggcattcagatgagtcagaaggagctggggcccacccctcctgcttcctcgccgcccccctcccagctgcccccagtaaatcccctcaggcccctaggacctggagggacgcggcaggtttatcatctcagcctggaaaccacgtgacctacctgtttcccaccacagcgccccaggtttcagaagcagctgaggatgcccttcgcaggggagggagggacagtgagaaaggagggtgttcagggcccagggatcccccacggaggctgccccatcagaacataccgggcacctgtggcctcctctgagattctggcctgggcagtggtcatttgagcattggttaccaaggctgcctctgaaatggcaggctgggggcaggccagcgtgaaagggactggcaggagtcctgcggggacaggctgggggcaggccagcgtgaaagggactggcaggagtcctgcggggacaggctgggggcaggccagcgtgaatgggactggcaggagtcctgcggggacaggctgggggcaggccagcgtgaatgggactggcaggagtcctgcacggcagctgtgctggggaggggtcaccctgggccctgagaggcacaggacattgcgatggggtgctggcctgccaggagcacagatacagagctagagcccagtgaggcctgtgctgtgaggggctgtgctgtgccaggggaggccccgcacccgggaagcccagaggagagtgtgcactcacggagccctcctggcagggccgcgtctctggagcagcagacccgtgtccctctgggaggtcaactgcggcctcacagctgggcctgtcccagcacagcccttgttggagggcgcacccccgtgtcctcagcaccccagtgttgagtgccttgacctgcagaggggagcctgtgctggtcccgggcgtctgtgtggctcctgggtgcccatctgcacccctggccctgctctgggcttcagtggagccgtgccaccgtgggagtgtccagggtcctgacgtagccctgagacgtggccagctccctggcctgctgcccgcacagtgggcccttgtctctgctctgggtcaggcgaggcagccacccatgatgagctctgcagccttcccaaggtggctggtgagtccctgccctttgcacccccagcaccctcacccctctacccgggcgcccggggtcaggacccgctcctgaggtatctgtccagctggccgccccctctgtctgggggtgctggacgagtcccactccttgccaaccccagggtggctcctcagctctcaaacaaggggcgggctgcagggattccgagggcccctccagcaagaggtcccacatgcatctcccaatgggacacttacctggcccacagggtgggtgtgacactgagggttcctgggggcagattcagggcatgggatggagacagactggttgtgaggggcccaatgcagggggccggccccagcccacagggtcgttctgcagatgggctggtcggggacgctctaccaggtgaagggtctgtggtcggagtcttcgccctggccagggcccaggacgctcacggtgcaggctgagggtcagagccgccgagggccccctgccgggattctgtgcaaagggcctctgcactttatgtgggtgcatgtgaatgcccctcgccaagatgttcctaccctgcacctgacacttcccacgacaagaagtgctgaccccagagggtgtgcgcggaccccagagggtgtgcgtggaccccagagggtgtgtgcggaccccagagggtgtgcgtggagggcctggtctgacctcaaggctcttggggcacccacacaggatgggctgtgaggggttggcgggggtggggggggtggtctgtgatggccccctgctgagccagagtgacccctacaaccggtccaggggtccacggaccagaaggccaggttctcctggaggtcccatctcccctgggcctcggtttccccttctgtgactccacacccccaaggagggccctgtcagggagggcggggggcactggttaatgtccaggacatggctgtcccagtcaagccaaacccctggaatgtgctgaactggctacactgagcggggctggcctccgagacagaggggcctgccgaggacacggaggctctgtggaacccagggaactggtcacactgaggacacggaggctctgtggaacccagggcctggccacactgagcacggctggtcccccaagacagagggacctcctgaggacacagagtctctgtggaacccagggcctggccacatggaggacacggaggctctgtggaacccagggcctggccgtggcaaggaagccccaagccaagtgtgtgtcagccttgtcctctctgtgggcctcagtttcccctctgtgcaacaaggggagtgaccagctggtttctggagtctcctcctctccctctctgtccccaggggtgggcctgggcctcatgtctgcagggggtgctgacacctgctcctgtggtccgggccttggggagggagccaagtgcagagagaatgtcttgcttgtgcctgctcagcccagagggacacatggcgtctgcacctgcttcccgcttgggcacaattgccctttgagagcagagccaggggcttcttggggacggaagctgctctcagaagccgcgcactggtggtgggggagcggcaggaaggggccggccagctgtcctagccaagagcctttcaggaaccggtggcccagggcagaggtggctggaggtggagctgtctgtttgggcctcaggtgtcggggcaaggcctgcttgggttttacacgagtgttgcgcctttacccgggtctctgtcagtgggtcccgcctgacccgtgggtgtgcatgggtccccgtcgtaggcaggcgttctgccctggccaggcgtggtgtccggcatccggccatctccctcctccctccttcccttagccccgcatccaggtgccccgtgtgcccggcctgggcggctggccgtggatctgaccgctcctgcatggtggaggaccagcgttcccactgtctgcagctgtgccacctccctgtgccgggctgtgcgtgctcacgctcggctccgtctgcctttgtgcgatcagactgagagaccccccaggcaggtcccgcctgcaacaagcagaccccatgcgtgccccaaatgccccctcacccgggccctgccctggtgggtgttgcctgggagcaaactcccagaatggccgccgggccccactcggctttggagcttctgattcctgtgggcgcttctcaggtcagggccctgcaggtgggaagcaccaggcactggaatgagggcactgtggggccagctgcctgcaggcaggggtctgatcaccaagcacctgtcccctgcaggatccctggctgtggctcccccgatgacgttcaggaagtgggagccgatcccctgtccccagagagccccgtgactcccccgatgacgttcaggaagtgggagccgatcccctgtccccagagagccccgtgactcccccgatgacgttcaggaagtgggagccgatcccctgtccccagagagccccgtggctcccacaggtccctgtgggctcacctctttgtgtctctgctgtggcttccacggtgctgtggcctctattctggggacactgagctcctccttgctcgaggttttgggtcctcattgtccacatgacctcctgctgggcgaattctgggatgaccctgtgtcctgggcacatggctggcagggtcccgggggctctctggccagcctcccctgcaccctggcaccaaccagcctggccgagggtcagctcccagagccgtgttgagaggggaaggggctgattccacagacatttggggtggagtgggtgcgagggagggtgggggaggggctgctccagatctggggtgagggagtcagaaacagggctgaccccaaggtgggtacaggaagaggcccaggtgtgggcaggagctgtctgcacctcctgagcgcattccccagtccagaccgggagcgagtgtggggctccctgggcctgtcttgctgacctgtggccctgtactgaccagcagagcatgggggtccctcgtaccccttcacggacagtgctcttcgagcgggagaggacgggcctgacctaccgcgtgccctcgctgctccccgtgccccccgggcccaccctgctggcctttgtggagcagcggctcagccctgacgactcccacgcccaccgcctggtgctgaggaggggcacgctggccgggggctccgtgcgggtgagtgagtggccgggggctctgtgtgggtgtagtggccggatctgctggggctgcacaccccgggatggggcgggggtggcggcggcaggcagatgcccgaggtagagatgagcaaaccaggctcagcgatcctgggtgccctgcggggggctgtgcccaggtccctggacgtcctggtcagcggaacttcctcctctgggcagtggggtgccctgcacgtgctggggacagcagccctggcggagcaccggtccatgaacccctgccctgtgcacgatgctggcacgggcaccgtcttcctcttcttcatcgcggtgctgggccacacgcctgaggccgtgcagatcgccacgggaaggaacgccgcgcgcctctgctgtgtggccagccgtgacgccggcctctcgtggggcagcgcccgggacctcaccgaggaggccatcggtggtgccgtgcagggtaggcgggcagggtgccggtctgggtccctttgattggccacggtccacatggaagggagattccagcgggaaattgccattctgccccacccctgtctccagccacaagggaaccaaccatccctttccccaggactgttctgcgcctcccgtcccaggcaaatccctctccccaggaccgtcctgagcctcccgtcccagacaaatccctctccccaggactgttctgcgcctcccgtcccaggcaaatccctctccccaggaccgtcctgcacctcccgtcccaggcaaatgggtattgatcacccccagtcacccagtgggcaggagcaggccctctatggctgacccgactctctctcatcccccccgctaatctctttatctgcagaggagaaggctggacgctgaggtgtctctcagctcccaaaccaacagccaccccgccccaccccttcctcttattctttactcccttctcaccctgcccagggcctggccaggcctcacccacaactttccctccaccccatcctctgtggccacctgaccccggcccgtgggagctacagcagggagtgcagcagacacatggccaacccagggaccccactgcagggcctcatgccccccgcctgccctccgctctctctgtgtgggcagcgctcaccagcctccctgggtgccgtccacctgggctcggctgctaagggctgtgagaggcttgttcagcctgggaggactcagggcggctgggatgagtcgtgtggaagggcggtcagagtgcgatggtcctaacccgaggcaccagcccctccttccccgtccccctgtgccttcctccagccccccgacctcggggacccagcagcccctcccacctctgccctcctccctgcagactgggccacattcgctgtgggtcccggccacggtgtgcagctgccctcaggccgcctgctggtacccgcctacacctaccgcgtggaccgccgagagtgttttggcaagatctgccggaccagccctcactccttcgccttctacagcgatgaccacggccgcacctggcgctgtggaggcctcgtgcccaacctgcgctcaggcgagtgccagctggcagcggtggacggtgggcaggccggcagcttcctctactgcaatgcccggagcccactgggcagccgtgtgcaggcgctcagcactgacgagggcacctccttcctgcccgcagagcgcgtggcttccctgcccgagactgcctggggctgccagggcagcatcgtgggcttcccagcccccgcccccaacaggccacgggatgacagttggtcagtgggccccgggagtcccctccagcctccactcctcggtcctggagtccacgaacccccagaggaggctgctgtagacccccgtggaggccaggtgcctggtgggcccttcagccgtctgcagcctcggggggatggccccaggcagcctggccccaggcctggggtcagtggggatgtggggtcctggaccctggcactccccatgccctttgctgccccgccccagagccccacgtggctgctgtactcccacccagtggggcgcagggctcggctacacatgggtatccgcctgagccagtccccgctggacccgcgcagctggacagagccctgggtgatctacgagggccccagcggctactccgacctggcgtccatcgggccggcccctgaggggggcctggtttttgcctgcctgtacgagagcggggccaggacctcctatgatgagatttccttttgtacattctccctgcgtgaggtcctggagaacgtgcccgccagccccaaaccgcccaaccttggggacaagcctcgggggtgctgctggccctcctgacaggccttctggccgtgcccatgccccttgggtgcctggggcagaggggtggaatacgttggggtgccccacgatagctgtggggggggctcttagtgcaggatcctgtggattagaaacaagttgctcctcagagctctcaagcagggactgctctttaggaaggggagcagcggctgggagtgagcagggcagggtgggggcagggtgggggcacgaagtgggccctgggtgacccccacagctcccttccgaggctgcagggccaggcgcgggaccgcaggtagcccagggtgttgtgggtggcagcacttgtttactggctgctttctggctcgaaataaaggaatcgtgcttgtgtcggg

SEQ ID NO: 149 - DNA, 1422 bp, Homo sapiens
accaagccttccacgtgcgccttatagcctctcaacttcttgcttgggatctccaacctcaccgcggctcgaaatggaccccaactgctcctgcgccactggtaagggatgctaggtttctggtccttaggatacctatttccccgccacaggatagatgtccctaggagtagaggtgttttttgagttctagctaagtggagtcatttatttcattgatctagtgcttttccactcagcgccttcatcatccctagaacattcctattctaatgcctcccatttcagaggcgagaggactcaggctcataattctcctgctccatgtcacccaggtagtcggggactgctaggctgagccccagtactctgcgcagttcctggggtggatgggagacaggagttattggtttttcgggattaaggacataaagcccatcctagcctctacagatagaagtaagattaggcttcatggtgccctgagttggacaggagctatctatcaggcctggcaatgcactcagctggcagcatttgttgaccaactgctgttatcttctgtataaaattcactgcctttttctcttccttgcaggtggctcctgcacctgcactggctcctgcaaatgcaaagagtgcaaatgcacctcctgcaagaagagtgagtgtggggccatctccaggaatctggggctgagccaagtcagaggcaggaaaccagagctgggcatggaggagtaggccaatgatccatttcccacatccccttccccagcaactgattcaggatcagagccagatctttagacgtgatggattcccaagtttcgttcttaaaatagacaaactgaggccaagagtgcaccagcctgccaagcacagacatgacacctaaggactttcctcccctaagtgtgtggttctggggagccagccttcctttgtccttcataaccccagtcactgcctttccagccttctgccaggtctggggctcagatggagataagcttttcacagaagaccctcactcgaaagatccaccacttatctcccatctccgacagtgcatgccatcctgaactaagtgtcctctggggctggggacagagcttgggccaggcttctctgggggcagggaagtccccggtcaagtctggtctgacctctcactctcccttcttccccaggctgctgctcctgctgccccatgagctgtgccaagtgtgcccagggctgcatctgcaaaggggcatcagagaagtgcagctgctgtgcctgatgtccggacagccctgctcgaagatatagaaagagtgacctgcacaaacttggaattttttttccatacaaccctgacccatttactgtattttttttaatgaaatatgtgaatgataataaaagttgctgacttaa

SEQ ID NO: 150 - DNA, 23474 bp, Homo sapiens
gcgacgtcacgctcggctataaaaggcgcggctcggggcccttgcggcgctggaggagctcgaggctgaggctgccggggggctgtgggctaccgggccgccggcgcctcagcgatgttttactcagggctcctcactgagggcggccgcaaggagaccgacatgcgggaggcggcgtcactgcgacagcagcgccggatgaagcaggcggtgcagttcatccacaaggactccgccgacctgctgcccctggacggcctcaagaagctgggctcgtccaaggacatggtgagcccccgccgccgttctcgccccggccccggcggcttcgcgcccgccgttttccgaggcccggccgttgcggctttcactgagtcacggcccggcccgccgctgcccttggctcgcggtcgctgcgtcgcggattcctccccttccagtacccctgctgcggtttcggtggggattccgtcgtagcttttctagcttgcgctcccctcggctgtgcctcctccctggatgtctcttctccagtagaaagaagaggtcctgccctgccctcttgccctcgggtcttctttctttttccttattcttaataccgaattttgttcacggggcttgtgcctcctatgctgtgtggctgttcctatgacccagacagaggtgattcctaatggctttccgtgagggggaaagaagtggaaagagggttttttgacagttgccagatccagaggacttctgttgaatccattgtccccctatgcaaaacccacttctctagttttggtcctaactttgaccttccatcctgagtggggagagagaaaaggggccaaatgtgaaggtttcctgaacccccaacatctcttcatcattctcctcttccagccccgcccccaaggagtgggtagagggaggaagccaggctgctgcatctcaccgaccagctaatgtgtgcatctggagctggggtgggtgcagtctttttttctagcacagttgttcctggcattaagtagaagcacctcaggacagggggcctggggtcaaagatggtactgtcctctttctatagaatgggatggatggctaagggttaccaatataaagaactgtatttgtcatccctcagccactgtagtggtcctgggccaagtttatgtttaactttgtagttttatctggagttttcttgtagtttgattgttttcttgaatttcacaatcgctttattcatttgggtggtaatatgtgaaacactaattaaatgtcttttaacaaatgaaataggtgctctgcataatttttctagtattttttattttaagcttttgaaatatttaattttggatgtggttgtcggccctagttcactgaaattgccatttctggccccaggagggcagagcttctgcatccatttccttttttttttttttttttttttaatttaacagctctaatgatacacaggtacattatattatacacagtataatataatatacaaaaatttttctcctccctgccattagttacttctgtgcagagtttgtctacttcagttatcttgctctgttttttttacaagttgtgtttttttgttttgttttgctttttgcacaacccacaggatagtttatctgatttatgctaacccagagtgataagtgattgaaatgtgctcctgcaaaagagataactctcttttcccttctttcactttaaagcaatctcgattcatttaacaaatcaggttcgagaagtattctttccttcaggccaaataatcctatcctagttcctagaatgctcagcaatcaataaagaaggaagtattatattaagagaagaattaaaatacagagtttttaaatgctggatttggttgtccctcgttgtcgaggagtttcctagccctgagagctacctgaacttccttctgcctaggatttcttatactacttcatgctgtgtaagaattccatccgcttttctgactctagtctgtctcagttgagtcacaaagggctgatagcatacagcacaggcagcaggctgcaaagaggaaggagcctcaagaagcaggatattgccttgagtatgacacatacacatgacagttgactgtaaggctctgaatcatggttcacgctttctgtgccccaccgtcatggagttgatttccctctctcactgttttcacacctataatgtacaagtgattgcacagaacagccaggttacagaaaccaaggcagaccgaggtagggctaggagagccgcaagcgctggggtgaggcagcatgcttaaactctcttggaactgttgttgcagccttagtacaatcttagaagtgaccttagaagtacattattattcttttactttataaatacatgtgggatagaccagtgttgactcaattttctctcactgcaagggaaatttggaggatgttaaaattaattgaatagttcttacttggagtagtttatagtataatctcgatagaaggagtccaagaaaagggagaggatagcatcagagggagataaggaagagagaggagaaattagttgttattgacttttgggtttgtgaagattgtaggttgtttttcctcataccagcaacctatatttgaatataccgctgggatttctgaattatctacctcttactatgctgtttctgtaatgttcactgcttgataccagcctgccagctcttttaggactggcagaaggcaaccataggaaatcaaagggggtcatgttctcttggccccaggaaagtgcctttgcctattcctgtgtatctggagttggctgatacaaagtcttctgtggaaattatatttttgtctgccccttttgcttttatccttttatcttgtattgttcattctgtattagattaagaactaaaaccagagatatgagtgagtaatattatatttgattttttttttaagagacgggttctcactctattgcccaggctggaatgcagctgcagtcacatcttactgcagcctcgacctcgcaggctcaagagatcctcccacctcaacctcctgagtagctaggattacaggtgcacaccacaacaccaatctaacttttgtattttttgtagagatgggattttgccatattgcccaggctggtcttgaactcctggtctcaagcgatctgcccactttagcctcccaaagtgctgggattacaaacatgagctaccacacccagccctgatttttttttttaactcagtgaagctggagaaaaacatctccgttcttggaaatttgcctattgtaatttatcttgttttagctaccaggttcataaaagtttttctcattgtgctaaggactttttaatttttaaaaacagtcatgttatgtggtaatatgctgtctttcctaaatgatattatacttacctgtaggcattaggccatattcttacttgtctggcaatagagtttttctttcctacatatgattgcttctgatcatagctaaatgctttttcaaaactgactagaattaggaatgatgctgggggaaagatggttgaacacagtaaagcaaacttaccataaaatacctgaacagaatctctgtctattagagcaggtctgtgtggtgtgccctatagattagctatccatatcaccacaaatcatgggctggagaatttcagaggcttagaagagaagcgtgaaataccagtataacaccaagatctggcacaaactgaagatttgcagagtcgtgattgcatcctcgtaatagcaaacattatttgaatacttgctgtgttcaggacacagtctaggggctaagacacaaataggaagacagaaaagtttctcattataaacaggtttataggttgggggcagggaaggacagatcagttaatttaatatacaaatatttattgagtacctactacacatgtcatgcaataatttaagctttggagatataatagtgaaccaaaactgagttcctgccttgacggaactttcattcttgtgggaggaaggaggcagaaagtaaaattaagtaaatgtatataaggtaataataataaatattttctatggagaaaataaatcagggtaaggggaatagggaaggcagtgactggggtggggtggagtctggctattttgtacagggttgtccggcaaggcctatctgataagattacatttgaggagatactgaagggaattaaggagcaaagtttctcagggaagagtgttctaggcagaaggaacagcaagtgcaaaggactgaggtgtcactgtgcttgatataactgaagaactgtaagaggaccagtgtagctagatcaaaatgagcaagggggagggtgatagaagataacatcagagatgtagtaggaggccattgtgcaggcatttgggtggttttttaaaattattattttttttattttccactcttttcagcgcatacctatgcatttgggttttaacctgagattggaaacgagtggaatattttgagcagaggggtgatatgatacatacgacttattttacaaaaagactactcaggctactatgtgggttacactgtaaaggggcaagagtagatgaagcaggaagactgattaggaagctattatacagtaattgaagtgagagttgatggtacctcagagcagtgtgataagctgtgaaggagaggaggaaggatcaggttctggatatatgttgaaggcagagctgacaaatgtaattgatgcattggattaagagtgaaagagtaatcaaggaagaccatgaggtttttaacttagccattggaagaacagaattatcacttgctgaagtggataagacttgcagcggggagcaggttgaggatggcaaataagaatgaagagtttgcgggctgggcgcgctggctcatgcctgtaatcccagcagtttgggaggccgaggcgggcaggtcacgaggttaggagatcaagaccatcctggcaaacacggtgaaaccccatctctactaaaaaatacaaaaaattagccaggcctggtggcgggcacctgtagtcccagctactcgggaaactcgggaggctgaggcaggagaatggtgtgaacccaggaggcggagcttgcagtgagccgagatcgtgccaatgcactccagcctggacgacagagcgagactctgtctcaaaaaaaaaaaaaaaaaaaaaaaaaaatgaagagtttgatttttgaacaagtttagggtcccaattagttacttaaatgtagatgctgaatagacaattctagaagaagataagtaacaccaccagaaagcctgtgctagttgccaagatgtaatagtcagatgtgccagaggagtccagcggaagaagtgatttctctaacctgatgtgatgataaggatggagactggcatctatttacacctttaccattccctttgagccagctgactgtgagatggtatggagagaaggctgcctctagagtgtgctttgtagaacctcagagtaggaagaattttacaggttatctggtctaattccttgcccatttgtgaatcctttctaacaaaatgcagcctccgtgagcagctgagaaaccattatctcagactaatccacaaaacagataataatgaggaataggttgtttgttgggtcatgagcaaaggcaaagaaatagaacacagaaggcctggggcagtgtaacagcctgccttatgtttttgagcaactgcaaactgaagaacaatctgtgtttccatggggtagaatgggtcacgtgttatatactcagctagtaagcaaagagaaggcacaaatattggtgaccttttggatttccaaggtcagagatagagacatgtatactgggcttgactcaggagtccatgtttatctatagactgtatatgaggactaaaatggagtagaatgatttcaggcccttttggggtaaaagaaaaagtgaatggtatccatgacccttgttctaactaagctctagttgtggctctgttgctagctagtgaccttggatttctctcttgggaataaatgctacaaagaaagcagacccctaccatttcctctgttttctagtttggttcattctgtggaccacagaaatccattagtttctgtctgggtagcttgggtaaagggattgagagagtggctttaaagttcttgctcaaattatgattctatggtatcctgcactatagtctgattcctctcacctctcttttcttcaaactctatagtttggttagaagagatgtttaagcagtgtgggtgccagattgaggaactgtagctattttcacccagaatacagcacttcccatagtgttcatttcctttagaagctcttgatggcgatggaggcagaatatttgaacttgcctggttagagtttagatgcctctagcagccacatttcaggaagagtagagaagcagggactgcttaggttagtagctgccttgttgaagtttagcataaagcagaatccacgtcagaaagacgacttaaaaattatgtctaaatggccaccagggtatctgcagcatccatctagcaaattagtactgtgtatccttttttctttctttttttttttttttttttttttgagacggagtctcgctctctcaccaggctggagtgcagtggtgcgatccgcctcccgggttcaagcgattctcctgcctcagcctccccagtagctgggattacagacacccaccaccacacctggctaatttttgtatttttagtagagacagggtttcaccacattggccaggatggtcttgatctcctgacttcgtgctccacctgcctcggcctcccaaagtgttgggattacaggcatgagccactgtgcctggcctccttttttctttttttgagacagagtctcactctgtcacccaggctaaagtgcagtgtcgtgatcatagctcactgcagccttgaactcctggcttcaagtgatcctcccacctcagctcccaaatagctgggactacaggcgtgtgccatcatgcccagctaatttttaaatttttaaaatttttaattaaaaaaaattgtttttgtagagacacaatttcactgtgttgctaggttggtctcaaagtcctggcctcaagcagtcctgcctcagcctcccaaagtgctgggattataggcaagagccagtgcacctggtcagtactgtgtatcttgaaagacaggacggcccttggaaagccaatatgtcaataaacaaatgagaaccacttaaccatatttataaaacagtcatagactggggatacaaatagtagaaattctttaatatacaagtattgaagggattctgaaagaaagaattcaatgatattaatcaagaaaggctttttggctgggtgtgatggcccacacctgtaatcccagcactttgggaggccaaggcaagtggatcacctgaggtcaggagtttgagaccagcccggccaacatggtgaaacctcatctccactaaaaaggcaaaaattagctgggtgtgctgctacgcacctgtagtccagctactggagaggctgaggtgagagaattgcttgaacccaggaggtggagatttcagcaagccaagattgcgccactgcactccagcctgggagacagagtgagactccatctcaaaaaaaaaaaaaaaaaaaaaaaaggaaaaaaaggctttttgaagaaagaaggggtagagatttctttcagtactatgtcaagagctgaggatatagctgaaatcaagacagtcatggtccctgcccttgtgcagttaacatgctggtagggcaggggtgaaatataaacaagtaaatacacaaaataatttcatattgataattactatgaaagaaatagtgagatttgttagtaactaaaaaggtgacctacctactttaagttgtatggtcaaggaaggtatctctgaggaaatgacatttgaacagagacctggaagataagagggacctaactattagaaatgttaggggaagaacatttcaggcagaggggacagccagtgcaaagggattggaatgggaaagaaattttgagcaaggaagtgagtgtggatggtgttgaatctgaatgaataaagggagagtggtttgtatatggaaggagaggcaagggccagttggtacagagctgtatagagaagggtaaaaagtttggattttttctgaagaacaatgggaagccattgaagggttttgagtaaagtactgtattacctgacttatgttttaaaaagcttactctggtttccatgcaaagaatggactggagaagggtaaaagaagaggcagaatgcaagttaggaggctgtgacagtacagataagaaattatagtggtttggattagattggaggtagtaaagatggggagaagcagatcaattccaggtgtgtttcagagtacaatatcacttttgatgggaggtcaggaaatgaaaaaatcaagaatggatgtatggtggtgccacttaccaaggttgttggaaaggaattaacccaatatgttaaaactgaacaagtctttggagttcaaacctcctttatgactgatcaagagagtaaggtttggagaaaagtaatgctcatagaggttagtgatttgcccaagctaatatgtgacaagtggtaatttgctgaaagcagaaagccttcatggagtagtaattaaaaagatgagattgggaaggaggatgaatggtagtggaaggtcttgaatggtaaattgaggatttttctttgttacaactagcaagagaaccactgtgggggaagaggaccatgaaagtaatgttaggagattgggcttagcagtaacgtaaatgaagaagaaaataagaggaggcagaatttcacccaccgagatagggaataagggagaatgcgcaagtttgatagaaaatatcagtgggataatttacatttgaagtgcctgtggaatatctaagtagagaagttgaaaaaggcagttggatctatgggtctagaattgaggtgacatctggacatgagatagagtcatcatcataaaggtagtaatttatgcaatgaaaacagataaaattgccctgggagtatatgtagagtgacaaaggaccaaagatagagcgatgaggaacactaacatttaagaaatgaacataggcaaaggaaccagtgagagagacaggaacagaataaacaggtggttttagaggccagtggaggagcgtttcaggataaatgaaatgttgagtttattgcagcattgtttctaatggcaaacatatgaaaataatctaaatgcccattagtaaatagttaaggtatgcttataccacaaacttgtctgtcaaggatgtgctgttttaaaatgcagaaagtagggcagacataagaaaatagatgctaagctggttataagataacctggcattatacctgcctaagttacattgtgtgtgtgcacatgctttagtttttgcatctggcagacactgttagttggctaaattatcacccatccttagcccttttctttatgctgaactcctctatagagattataaaagctaaattctctcccaatgtctgttagagctaggagtggccatatgagttctgaccaagaagatatgggcaaaaaactgctgaaggaacttctgggaaagcttttccttttctgataaaagcaattgatggtgttagtgtagtccctcctccttcctcatttcttgaatgtggatataatgcctggagctggggtattcatctgtgaccatgaaggaatgtccaagagaattaacagagtcaatagccctgaagttgttaagctgctgagttagtatcagcagcttctatgtctagacttcttgttatgtgagaaaaataaatctccatttaaactacggtaagttggcttttcttgtggctgaactcttttctgctacatggggtatatttttatttaaaatttttaaaaatgtaaataatttaaaacttttaaaaatttaaagctgttgcttgtgttagggatctccatatctccaagtaaatggtgatactgctatttcttaattaactgttttcatcactatctatctagtcttactttttttttttttttttttttgaggcagggtctcgctttgttgcccaggctggagtgcagtggtgtgatcttggctcactaccacctccaccttctaggctcaaattagtctcctacctcagcctcccaggtagctggggctacaggcgtgcactaccatgcctggctaatttttgtattttttgtagaggcagaatttcaccatgttgcccagtctggtcttgaactcctgggctcaagcaatccgcccgccttggcctcccaaagtgctgggattacaggtgtaagccaccgcacccagccctgattttctattataatggataaaaacttaattctcttacaccttcccatcatattcactcttctattatactaacattctgttaaataactattttgggtcaaataagcatttattgcttacattattatgactatgttcttgttatttacagctgagtcaaatgtactatttcttttctcataaaaacatttttctcaaaattaataatttccttggtgtttaaaaaaagtttccatgtaaaatttaattctccttcaagtaacttaaaactatagatggtctagcaagtccattgttttcttggaggatccttcctagagccccctatcttttcatttcattttggactggctgcttttaaggcctgtaggcaacctgtatcctggacttttccttcaacaccattcttagaactgcctttgcctctctattggattctttcattcttagatctcatgtttttctccttgttgtttgtttcccttgctttggtgaagcatgcatatctttcagtagcttcttgagaagacacaggaaataactttcttgagtcttgattgatagtttgactaggtttacaaattatgtactatcaaattttttttttttttgagacggagtctcgctgtgtcacccaggctggagtgcagtggcacaatctcagctcaatgccacctccacggtgagttccagtgattctcctgcctcagcctcctgagtagctgggataacaggcacccaccaccacgcccggctaatttttgtatttttagtagagatgggatttcaccatgttggcttggccaggctggtctcgaactcctgatctcgtgatccgcccacctcagcctcccaaagtgctgggattacagacgtgagccactgcgcccggccccagatttttgaaggcattattctattgtcttttagctttgactgttactgttgaatagtcctctactattctgattcctaatcctttgtattttgatcatctttttctctttggaatcttgtggaatctttgtcatcaatgctattccaaaatttcacagtgatgtgaaatcttgatgtggatcttttttccttcattatggtaggctccatgtgggccctttcaatctttaaactcatgtccttcagttctggcttagtatgataacccacactacccttcagctgttctcgaaatctgaaagcctagccaagctatcaactaatcagtctttttatttactcttacaagaagagtaaacttttggcattctcctcagttctccagatcaagtgagtctcatgaagactttagtctatttccaaccctaattgcatccttcaactgtagaggttctgatacctgtaactcctcagccttttaattttagtttgagtagtacaactgcttttacagctagatgcaaatatataacagctcaaacaaaatagtttattttttcttaagtaacagtattagtggaaaagtcaacaagacagcctcttccatatagtcctttagagactcaaactaacagtagctcttctgtcttcaacatgtggcctctgagaaggtaaccatagtggtcatctccactccagccagtcagaagaggaaaagaatatagagaagtatgcacaggagatttttatgggccaggcatagaaatggtgcatgtcacttccactcacattctattctgtagaactcagtcatatggctatgcctaactacaaagagggctaggaaacagtctaggtatcttctcatgaggaagaggagaattttaaagaggattttaaagagcaactggcagcctctgctgcttcagctctctgtgaagtgaaatggtataaagcacttagctttctctagtccaggtcattaattgctgcttttctgcctgctattcagattccagaattttgtcaacatcttttttttcttctttattgttctttttgttttgtgggtttaggacttattcttttactgtcattttagtgaaattttggctgaaagcagaggtaaatatgcagctatattgttacttaagatatagtatatgtaggtataataaaatgaccagagaaaaacatctctgaggttcatatgggtttgttggctgtaaattttctattcctgaactatattatgagtactttttaattatcaaagagaatgaaaagaattatgtatattgacatagaaaatgcctttttgttttgagacggagtcttgctctgttgcctgggctggagtgcagtggcgcgatctcggctcaatgcaagctctgcctcccgggttcatgccattctcctgcctcagcctcccaagtagctgggactacaggcgcccaccaccacacctggctaattttttgtatttttagtagagacggggtttcactgtgttagccagaatggtctccatctcctgacctcgtgatccacccgccttggcctcccaaagtgctgggattacaggtgtgagccaccgcacctggacagaaaatgcttttatatattaaatgaaaatagaaaatttcagaacagttttatagtatgattagtcttttatatgtttataaatgtattaatattttttgaaagatatatttctaaatttaatggtcattatttgttgggagtgggactgagaagggcttgagagattggggaggtttttgcttttaattttatttatttatgtatttgttcatttatttattgttttgagataaagtcttgctctgttgcccaggctggagtgcagtggtgcgatctaggctcactgcaacctcggcctcctgggttcaagcaattctcctgtctcaccctctctagtagctgggattaaaggtgcatgccaccatgcctggccaatttttgtattttttcttttagtagagacagggttttgccatgttggacaggctggtctcgaactcctgagctcaagagatccgcctgcctcggccttccaaagtgttgggattacaggtgtgagccaccgtgcctggcctttgctttttattttatatatttcagtgatacttaagtattttacattgagcatgtgtttgaaccttttttggttactaaagaacaagtaaaggaatagtcagcagggccaaatgcactagaaaagtctggtaaaattaaggctgaaaatgtctattgtatttggaaatcagaggtaattattggtatgggataagaagtgatctcagtgaagaaaatatgggatatcagaaaatagatgtcatggtttagtctttttttaaaaagaccattccagataaggagggtgattaaaggaggctgtagagtaaaggcagcaggatctgacattttgtggaggagtttgctccccaatatctaggaacttttagtatgttttataacttttggaagaagaatccagtagaaagaggaaaatacagaaaagggatgaattcaagcataatgatttcagaacttccctcgtttgtctcatctgtccactaatgattaggttcctttgcaagattaagaactagataaagtgtttagcaagaccaatgtaggaagacatccccaaactttaggtaagagggctttgtttaggtggtctttgaaactccttccaatcttcacttctacaagtccagttttatctgagttggtcctggtaagcatggatgtaacagaaacaaacaccctgctttagtatggcttgagctaggaatccattcttattggtgagagagattcgaatgaaacattttcatttcttttgagaagcaaagcattatcccagtgttgcatcacaaaatctgacagagttagcacttcctctagctcctagtcaagctaagaagctctcattttctttacaagtgcctctccctccacttttcccaaagataccagtttagaatgtgctttgccaagaatcagtgtattttgggaatccatttcttcatctcactagggttacaatgagtcatggctgtgactgcattcttccttaggaatctgaaaggtggcagatacactgaagacctccagtgccagcccctccccttgaaaggttctaggctctgggcttctaagagtgacttccttccccatagaatgaaagtgtcatctggtatatgttagatagaaacttggggtgaaacactctcctttgagggattttaggttaaacactctcctttgagggattttaaatggtattgtagccgggacataagatatttgtgtatacaaatttctccagtcaaaggatttcttttcaagagatatcttaaactttctggaggccactttgaatagaaacagtggagcatgattatatctgccctaggaactctcctaagctctatcaaagtgtagacttaaactcacacttctcattctgcttcttaacattaggcatcctggcatgcatataaggtctaattaagtcccctgcttcttggtcagtgtctttccccttcatacctccactttttgggccattgaagggaagggaaatggatgacaagatagggcaggagaaaccagtgttttgaggaccaggggatgccagcatcgatgattcttgtgtgttcgctcaggtttcaaagtgtgtctgctgagaggcttgctcagcaagtgtgaattcctgtcttttcaccctatccacccatgggtgactcagtccacaggacagccagccactaaggcttctgcaggctgcatctgaaagataagagagtgagacttgacacagaagtaggcagagcttctgaatacctgtgttagctaagtttcttcagcctatgaaaatgagctgccctttctataaggcagtgatttgctgtcacctaggaagatacagagattacttactctagactaagaccacttttcccttgaaatgctcttgtaaggggaagaaaggtagcaggcctaggttagtccaaatcacaagggttctcagttctcttaagccctagaatatttatcggccctctccacatttcccagtgtcatatcttgcattttcattcattcagggtggcctactgcaaattggtttatggtacctgctctgacaataccagtgaagtcctcacttgaaggaagtataaataagaagcaaagatagagctcagttatgggaggctccttcattatttttatggcacctgggggacaatgggaaagagggatgtggcctgtcactaagaagtctctgctttctatccctcaagcaacctcataatattctgcagaggcgcctcatggaaaccaacctgtctaagctccgaagcggtccccgtgtcccttgggcctctaagacgaacaaactcaatcaggctaagtctgaggggctaaagaagtctgaggaggatgacatgattttggtttcttgccaggtaatgttctgagaacagcttttccagggttttctggaaagtaggatgtggggccctctcctcctgactttatagagtgtgggtctcatggaattcataagtgagttttaaaaggggcactccatgcaacactggaagtgtatgcaacattttgtaagcatgtgcatctttatgggaagaaggaacaaagctttcatcagatttacaaatgggtatgtgatttttttaaaaaagattaagagctatttggtgtatagcatgaaacacctagagtttttgggggatcttctgtcagctctggattcagcaggaacaagagccagtcaaaggcagacttagcagtgggtaaagatgggacactataacccataattgggaggatgctctccaaccctgcctttcatatgacatctgctgcttgctgtctgcatctcctttccctttcgcttctctggctcttattgaacagtacatttcctccccacagtgtgctggaaaggatgtgaaagccttggttgacacaggctgcctatataatctcatctctttggcctgtgtggacagattggggtaagtaggcacttgtgctgagtggaacttagatgtgactgtactcttcgcttgactctattttatggttagagatggtgagggtctctacagcagctcaaagagaagtatgcagagttcagatctcagctggaaccagaatccttagtagaggggaggagtagtgggttatccggcaagtgggagaaatcagtgagcagggaaacctttggctttctgttaactccccctattaagttttgagcaaagacctctaaacttgaatgagagagcctgagacctctggctcattgtgtgccctgccctgatccactagatagcaaattaaaaggagctgtcctgttggtatactccatccagatgagtaaaagtagggatgtggtggggcttagcttactcagagtctttctggaggatgcattgcaggtccccaagaaacatccatcagaactgagaataggactgcagctgctactgggcctgggccatcataagggtaattagccagtagtttcttttgtttgttttgtgtggcggagcctcactgtgttgcccaggctggagtgcagtggtgcaatctcagctcactgcaacctccgcctcctgggctcaagtgatcctcctgcctcagcctcccgagtaactgggactacgtgtgcgccactatgcctagctaattttttgtattttttgtagagagggggttttgccatgttgcccaggatggttttcaactcctgggctcaagcaatctgcccgcttcagcctcccaaagtgctagcattacaggcgtgagccactgcacccagccctgagcttttgtgtggtaaaaatatgaagtatagtgcaacatgatggttccagaaagactaacaatgtcctggtgcataattaggcagcagactgccatgattccagaggaattaataaccatctgtaaaactgcaattatttttcttttggatgggctataacaccaaaagagaggaaatagaggaaagcagaagtattggcacagaaagttcataattaagtatttatccaccaacccataatagctcgggtgctagctattccaatcagcttatgtaacatgtgaaaccttggtactgtttctttccttcctcccctgcacagacaagttaaattaacaaggattttctccatgatattccttgctgatatgaatatcagtgcacttaccaaataagtacttgcctccattaacattatagtctaagacagactgatgaagacagagtgaaatagaaaggacaatgagaaaattacacattgaacaaagcaccttataaaattaggattaatctgacttctctagtatctgttactcacagatgggtaaaaggatgtgtcaactcaattgcctcacacaatagtggggatagtaggatacagaataggattctctgaatatatcagttctcctctcttcaccaatacacataagtgatgtaaggtttttgagaacgggagatgagtctttagtgtttttatatctccctggcatgtttaggacaaagtgctggaacaacatatgtaggatggctagcacttttcggtagattaatcccaggagatccctggagaattccaattgtaggtcagaaggtaggcattgcaggattctaccaggaatctctgtcaaggggattttggtatcttcctctttggtacagactcaaggagcatgtcaaatcccacaagcatgaaggagaaaagctttctctaccccggcatctcaaagtagtgggccagattgagcacctagtgatcacactgggctccctccgcctggactgcccagcagctgtggttggtaagcagaattgagggctggacctatggaccctaacggaaaccctctccctacccccaacaaaacctcatgtcatctcatgcctgtaaatattgactttttcaaaatggttcccatttttttgtactgtagaccttgtcccaatttttgctctccaaagtaatagatgggccctgagctacattcaagacatgttgagaatcaatcagtaaaacaaatgtggtcagataaaaaaaaaattcggccgggtgcggtgggtcatgcctgtaatcccagcactttgggaggccgaggcgggcggatcacaaggtcaggagatcgagaccatcctagctaacacggtgaaaccccatctctactaaaaatacaaaaaattagccaggcgtggtggtgggcgcctgtagtcccagctactcgggaggctaaggcaggagaatggcgtgaacctgggaggcggagcttgcagtgagctgagatcgtgccactgcactccagcctgggcgacagaacaagactccgtctcaaaaaaaaaaaaaaaaaaaaaaattcaaggagcaagaggccgggcgcagtggctcacgcctgtaatcccagcactttggggggccaaggcgggcagatcacctgaggttgggagttcgagaccagcctgaccaacatggagaaaccccgtctgtactaaaaatacaaaattagccgggactggtggcgcatacctttaatcccagctacttgggaggctgaggtaggagaatcgcttggacccgagaggcagagcttgcagtgagcagagatcgcgccattgcactccagcctgggcaacaagagcgaaactccgtctcaaaagaaagaaaaaaaaaaggagcaagaaaacacatttttatgtataggtgaaaatgtcccttgagagctttccatgaactagttagagacagagagcaacttacttactcctttgccataaatcccttgataatttcccaccagtttccacacttctctacattttactcttgactactccaagttcttggtttttgtgtaaaggcctttgtcctttagagtaaaaaagacctgggtttgaatcttggctctattgccttgtaagtttaatgatctaggaaaattacttaatataacacatgctcggccaggcgcggtggctcatgcctgtaatcccaacactttgggaggctgaggcgggtggatctcctgaggtcaggagttcgagagaagcctggccaacatggcaaaaccctgtctctactaaaaatacacaaattagccaagcgtggtggtgggtgctggtaatcccagctactccagaggctgaggcaggagaattgcttgaacctgagaggcagaggttgcagtgagccgagattgcgccactgcactccagcctgggcaacaagagcgaaactccatctcaaaaaataaaaaaaaaataaaaaaaaaataacacatgctcaatatatgtttattggatgttattggatggatggatggaacctaatagtgattaggccaacttctaagcaagcatggaaatggctaaatcttaatcatttttttgtttttattagatgacaatgagaaaaacttgtcccttggtctacagactctccgatctctgaaggtaagattgactccacttaccccttgatacttcctctctgaggcaggtatcctcttacacaggaactcatagtggtatcactgacaagttacctgttttcagtgcatcataaacttggataagcaccggctgatcatggggaagacagacaaggaagaaatcccttttgtggagacagtctctttgaatgaagacaagtgagtgcccaaatgggtcagatcaagtcacatccatttgtcatcagctgcgagcagggtggtggtggttctcagacaggacatggggttgtatcctgtctttggctttcaattatactacaaatccacccttccccacacccagagttcatcaccccacaaaactctgtagtgcacacatcagaatgagcaatggtgatgccacacagagtggtagggaaatgactagctttgaaagcaaaattttacttgccttcagcttaactttttttgaatttggcattatttctcctgatatttatttctcatttcagcacttcagaagcataactacagcctgcagcatgtctgcacgtgtgcatgcatacacaccgggttgacagatagagaaaactgggtttgaaccaaatgccgtagtgacttgctgtggaccaagtccttccatctaatagaagctccaggggctccttcccattcagacctctctagactatagtctatgcttagagatcttgtctggttatggccattgttttttactactttgatcacttaacttatagaccttttttgacactgccagtctcacttgtggcctatttctctgcttcttccaggaatttgcttttattagtcaagtataggggctgccaggttctgtgtctccatagatatatgtgcttcttttcctatagctaaatgtataataaacaggaacctgacctttacctcctttcagctgtttcaaacaggtgccaggatacctatgtcttagaattagagtttcttcaaattgattcattgatttctcaagtatggattatgtgaaagagcccagggacattatccattacagtttaactctttcatttaaaggtccagagaggcaagtgaattgtctaagttcatatattaggtcagtgactgaagggaccaagaacgcagacctgatttccaagccaagactcccatgctgcctcatttgtattcaagcctttaacaggagggcaaagaggtgagaatgtgttaaaaaaaaaaaaaaaaaggcagagcatgggaggaatattctctggagatggatgctaggatgatttgggtagctctccctcctgtgtgccaagcccagtaaaagttccttgccccaaactgtcacatttaggccctcatcttggtgcctaaaaacgagcgtacaaagatgaatgaaatggtttctcactgtgaacctcttggaggaaaggaggaaccacagacagaggaatattaatccctctctgatatggaattgaaggcttaagtaaatcagagtgtcactgtcagacgttgattactcccaagatccgatcagcatttctgcccatcctattatgtgtctgtcaaggactgaagtagctggaaaccaggagtagagaaagatggggggaaaaaaagagcaaggccagaatagaagggagtagactgagtagaatcagttggtggagaggcctatctagataaacctttctgggaggcagggaatgacattttcaggcagggaattgagatgttcagttctgtcctgatacaaggaaagaggcagagcaggagccggcaatgttaaggacaactttttataactgcccagtatttcctgacccctgtcaaaggttggggagaatacaaggtttcttgaagctttttgactggggtgtcacattaggcacacaggtgtctataatggaatctccccttcagtttggtcatagaagtgcttggacaagtcagaaaaatagctagctgtgggtatccctttaagatattcccaagtctaccctgtgtcatagcagtagttctcagagtgtttgtttaaaggatcccactttgaactttgccaagtactaccaactaccttgtctggtgttcagcaactgcccctactgaacagccctttggaactctgaatgatttgggcctcacagaagctccctaaagcctaggaacttggtgactatcatttgaacaactaggcagccatactgcagtcagttgtcatggggtcattccctaggcccccttcctatcagcctctacctaaagaagctagataggaagctaagcacagccatggttgggaggctatatctaaagctcatgaggggtgatcccggggttaccagccttcagcactccctctagcaacaccccattctcttacctagcggggatttgtacctttccactgaggcctctccatgctccttccctacctttcatggcaatactttggcctgcctcttatcctggtactaagttgaagtaaagctcaccctttacttccctacttgaaagttctactctgagccttgactcttagccacagtgaggcatgttgaaggttcctgctggtttattctttttttttttttttttttagacagagtctcactctgttgcccaggctggagtgcagtggcacgatctcggttcactgcaagctccgcctcccgggttcatgccattctcctgcctcagcctcccaagtagctgggactacaggcacctgccaccacgcctggctaattttttgtatttttagtagagacgggtttcaccgtgttagctaggatggtctcgatctcctgaccttgtggtccgcccacctcagcctcccaaagtgctgggattacaggcgtgagccaccgcacccggccttcattcactttctttaaatgcctccaagttgattattctcctagctcatatctccttgatgtgcatgagggagcactgggtctaatttttgggggctgagaaggtaagaaggtgaggtcagtttttcccaggagtcctaaaaaattctggtaccttacattgagggtgtgggagaaagggtgtcatagttctgaaaataggcagtagcatgaagcaccagacctgtctcattccttattagatgtctatctcaaataacagagtttgaaaaatattggttttatcatttgatatttccatgcctgactcgggaaaataacattttctgacttctttctattttcttgccctgcacagaccctacctggtacaattttctatttcttagctcaaagtgtctatacaatgggttgcctggtatgtcagctgccctcactcttgtgtaatagaaatatattgccaggctggggacgtggaggagacgaactggattcctccctcctcctgttgccaggcctctctgcattggcactttatcctttcagtgtttctggctgtgttgggttcatttgtgagactgatgtaacaataaagtgaaatcttcccctctg

SEQ ID NO: 151 - DNA, 1751 bp, Homo sapiens
gcagtactgaaggtggcgcctcggcagcgggctagaggccactggcactgagcttgcaaccagatccagagacactgaagaagagagaaaggtctgaagcggggctgatttgttgtgggtgcaggggagaggaaggctggaactggtctggggtcttaaacacgtgggggacgtttacagggtctgggggagggatccagccgcgtcgaggggctgcagcagctccaggcgcccaaactcagcagcttctctcccccgcaggcgcacctcttcccgccactcctagccccagcctccaaggatgcggctcctcgagaaactctgttcctcggccgcaggcagctccgcgccgaagcccgccttcgccaaagtgctcacgccgaatcgcatccccgaattctgcatcccgccgcggctgccggccccttgcacgctcgagtctccaatccgggccgccgccgtgccccggcgctgcgccgctgaaagcgacctgtggccccgcgcggcagacgaggacgccggccgcacggactgggacccgcgctcgcaggcagcgctgtcactgccgcacctgccccgtgtgcgcaccacctacggcttctgcgcgctgctcgagagcccgcacacgcgccgcaaggagtcgctcctgctcgggggcccgcccgcgccccggccccgggcccacagctgcggcggcggcggaggcccggacgcccccctggggaccctgtgcggcccgcgaggtccgggcccggccacccccgcggcccccggcggtccccgcctgccccaggacgcgctcgctgcggggccccgccgctgccgcctcctgcgcgtccccgacgggctgctgagtcgcgcgctgcgggctggaaggagtcgccgcctggcccgcgtccgctccgtctccagcgggaacgaggacgaggagcgccgcgcgggatccgagtccccggcccgggccccctcctcgagcccgctgtcatccagggccccgcttcctgagcgcctggaggccaagggcaccgtggctctgggccgcgccggcgacgccctgcgcctggctgctgagtactgtccgggaacccggcgtctccgcctccggctgctccgcgcggagagcctgttcggaggcgcccccgggccccgcgccgtccgctgccgcctcagcctcgtcctgcggccgccgggcactgcgcgttggcaatgcagcgctgtggtggggcgcagccgcaaggcctcctttgaccaggacttttgcttcgacggcctctcggaagacgaggtgcgccgcctggccgttcgcgtcaaggcccgggatgagggtcgcggccgggatcggggccgcctgctgggccagggtgagctgtccctgggcgccctcctgctgctctgagggcccagccctccccggggcgctctgccctggagactccggacactgacagccgcgtggtacagaataaacgttatttatttttttatttatgatactgctttattgacgttttacttcctcaccatccacatttgtcatcgtctattggtaaagaagaaaaagataatgactccctgttctgttcacaggacccccatatctctttccagaccatttttgcattccaaggaaaaatgggttggcttgggactgggagagaaaggaagtacacccatctgcattgtttttaattccttccggttttctatcaatgttacagtttttttttaataaagcaagttattcattcaga

SEQ ID NO: 152 - DNA, 19490 bp, Homo sapiens
attgcgggacggctggaggctggcaccgtggcccctgcgccccacgtggcgccctttccgggcggggggggtggggaggcacctccagcgacaactctcccccctcccccggcacccggctgatttgctgtgccactgggagggttcgggggtggctgagctgagagggctccgggaaggagtgacgtcagggtgagtgggagcccaggaaggagcgagtaggagagagggagcgagagccaggcaggaccgcagggtcggggctagtgaggagcgagggcaaggagagagcagtgaggccggagagaaagaagctgccgcggaggaagacaggctgcgggttcccgggactgcaggtccaggcagggtaggaaccgctgcccaggggagctaggaggaagcggggagagagagcgagcgaaaagcgggggtggggaggaaagggggagattgaggtgggagagagaagcagagcgagagagaggaggctgctggaaggagaaagaagagggtgaggaggcgacagagggagaggaggaagaagaggtagaaggagagagaaaggggagagaaaggagagaggagggttggaggtgcatgaaggaggggagagggagcttcagcgtggagagaggaccgcggaaggagagagagacagcccagagtggaatgtggaagggaaacagtccagcggggagccagggggcagccatggaagggacaggtggggagctggggggacaggggaactggggtccggaggacgccccaggcctcttggccagggcctccctgatcatgctcccgtggccactacccctggcctcctcggccctcaccttgctcttcggggccctcacttccctgttcctctggtactgctaccgcctgggctcccaagacatgcaggccctaggggctgggagccgagctgggggtgttcgtggtgggcctgtgggatgctcggaggccggcgggccaagcccagggggtcctggggatcccggggaaggacctaggacggaaggcctagtgagccggcggcttcgggcctacgcaaggcgctactcctgggctgggatgggtagagtgaggcgggcagctcagggtggcccaggccctgggagagggccaggggtcctaggtattcagcgcccaggcctgcttttcctaccagacctgccttcagccccctttgtgccgcgggacgcccagcggcacgacgtggagctcctggagagcagcttccctgccattttgcgggacttcggggctgtgagctgggacttctcagggactacccctccgcctcggggctggtccccacctctggcccccgggtgctaccagctcctgctgtaccaagcaggccggtgccaacccagcaactgccgccggtgcccgggggcctatcgggcactgagggggcttcgaagctttatgagtgccaacaccttcggcaatgccggcttttccgttctcctgcctggggcccggctcgagggccgctgtgggcccaccaatgcccgggtcagatgccatctgggtaagtagctgccgcctactgacaacctccttgcctcgatgatttcccccccagacccttctctccgccagagccgtctgctgtctggttctcattgtgcctctcttcttccatggctccctgttgccacccacagcagcatttcctcagcctcggttatctgcacaccaccttcataagctttgccgtggtcattcccatctgtactgcgtttcttcaccttggctctccccccgaccttttgttctacgtatttaaaagaaatatttatagcactatcagtattacttgccctaaatagtactcataaaaagcctggacaacacagtgagaccttgtctctacaaataataaaacaattagccgggcgcggtggcccatgcctatggtcccagctactggagagggtgaggtgggaggttcactggagctcagcagtttgaggctgcagtgagctgagattgtgctactgcactccagcctgggtgacaagaaagtactcataaacacaagctgaaatttaaaaaagaaagctttcaacagtctagaacattctagttaagtgctctagtctctctgatcctgaagcctacacttttttcttttttgaggagtctcgctctgtcgcccaggcgagagtgcagtggcacgatcttggctcactgcaagctccacctcccgggttcataccattctcctgcctcagcctcccgagtatctgggactacaggcacctgccactacacctggctaatttttttttattttgtatttttagtgaagacagggtttcaccatgttagccaggatggtctccatctcctgacctcgtgatcaatccgcctcggcctcccaaagtgctgggattacaggcatgagccaccgtgcctagccctacaccttcttttttaaaagggttggtggggtgtcaaagttacagtagcaccaaactgagattttttctttttcttttttttttttttttgagacagggtctcactctgtcacccaggctggagtgcagtggcacaaacatggctcactacagccttaacctcctgagatcaaaggatcctctcacctcagcctcctgagtagctgggaccacaggtgcccaccaccatgcttggctgattttttaaaaatttacgtaggccaggcgcggtggctcacgcctgtaatcccagcactttgggaggctgaggcaggcggatcacctgaggctgggagttcgagaccagctgaccaacatggagaaatcctgtctctactaaaattacagaaaattagctgggtgtggtgtcgcatgcctgtaatcccagctactcgggaggccgaggcaggagaatcacttgaactcgggaggcggaggttgcagtgagccgagatcacaacattgcactccagcctgggcaacaagagcgaaacttcatctcaaaaacaagaaaaaaaaattgtgtaaagacaggctggacctgaactcctgaactcaagtgatcctcctgccttggcctcccaaagtgctgagattacaggcgtgagccaccgcacctggcactttttgatgtcttaaagactggaagaaaatggaaaaggaaataattttctgttattccatgccatgaccttgttttgcccccaatcatctcctgtgctgccagctggatgtgtcctacacttcagggcacactagcctcaggatcagttcccaatccttcctctcttccctctctctgtgctctaaatcatgaaaaccttctggccaatcctgacagatgccacatgtgctgttcttttcaacctagaatccccttcccccgtaccacctcctgaaaaactcctactcagccttcagtactcaagttttcaagtgccacacttcctctgggttggcttcctgttcccccatcagttgagttggctgctcactttcctcacagcactcagccatgtggtccttgggccaggaacgtctttaatcttatacctctcagtgagacagcgcctatcacacagtaagctcttgagtcaaactgtcgaaagcccaggaggaaaagccatttcctccaggaagccttctcttttctcgaaatgagaggttgctgccaggtgccgtggctcatccctgaaataccagcactttgggaggccaaagcaggaggattgcttgaggccaggagttcaagaccagcactgtctgtataagaataaaataaaataaaataaaataaaataacgggtctggccaggtgcagtggctcacacctgtaatcccagcattttgggaggctgaggtaggcagatcacttgagctcaggggttcgagaccagcctggccaacatggcgaaaccccatctctactaaaaatacaaaaattagccaggcgtggtggcaggcagctgtaatcctagctactcgggaggctgaggcaggagaattgcttgaacctgggaggcggaggttgcagtgagccaagatcatgccactgcactccaacctggcgacagagcaagactacatctcaaaaaaaaaaacaaaacaaaaaattaaccctgcattgtagcacatgcctgtaatcccagcagctactcaggaggctgagacacgagaatcacttgaacctgggaagcagagtgagctgagatcacaccactccactccagcctgggtgagagagtgagactttgtctcaaaaaaaaaaaaaaaaaaaagatgggtcacactacccacagcagcgtttccctaatctcctagcacttccctcctccaggactgtattgtaattatactgtggccactttctggaaagaaaggaggatgaccacaaaacctggcatttaagacacttagagctagttgctaattgactggccaggatgggcccctgggatggaggcaggagtgctggatgcccgcgtctcttcttacaggcctaaagatccctcctggctgtgagctggtggtcggcggtgagccccagtgctgggctgaggggcactgtctactggtggacgactcttttctacacacagtggctcacaatggtaacggggtgcccattctgcaggggggatgagggactcaggagcaaaggagcgttgactagaaggcagcagaatcaggcccaacggacttcctgtcctaccaccaccatcttccagctgcatgaccttgaacaagccgcataacttctccaatgccctaggaccaccaccttcttcatcaagtaactgcaaggattaaatgagataatattacgtacacagaaaagcggttaccagcacaggactctgggttcctgtcctacctcttgcacttgggcaaaggacttaacctccttatgcctctgttgctttgtataaaatagggataattatggtaataccacagtttgttttgatgattaagagttgatacatatcggccgggcatggtggctcacgcctgtaatcccagcactttgggaggctgaggtgggcggatcacctgaggccaggagttcgagaccagcctggccaacatggtgaaaccccgtctctattaaacatacaaagaaattacccaggtgtggtgatgagcacctgaaatcccagctactagggagactgaggcaggagaattgcttgaacctgggaggccaaggttgcagtgagccgaaattgcgccactgcactccagcctggtgacagagcaagactccatctcaggaaaaaaaaaaaaaaaaaaaaaaaagatttgatacatttaaagggttagaacaaggcctgccacttatttactgtttgcttttatggtgtttggtgagtgctctggtgtgcaagtacctaatgtcagtggctctgctgttcctgtcccatgtgccctaggctcccccgaagatgggcctcgagtggtcttcatcgtggacctctggcaccccaacgtggcaggggctgagcgccaggccctcgactttgtcttcgccccagacccttgaaggaaggtgctcccttcacacacccaggctggagagacactgcgctcagggacggcttgatggtagccaggacctcctctctactgcgggggtgggcgggggcggaggatgggaactggctagtgagcactgaaatataaattctgaatcctctcctaactcccgactacttccttcgcagggagaggctggggcagggccttatgtcttctcctagtacaaccaaacaggtacctccttttttttctttcttttttttttttttttgtagagtcagggtcttgctttgttgcccaggctggtcttgaactcctgggctcaagtgatccttctgcctcaacctcctgagtagttgggattacacgtgtgagccaccacgcccggccagatacctcctaacacaggcatctccccgtccctctccccaggagccagcaccagtttctcaacttaactttatttcaataatttaatagaaaattaaaataataaataatatgaaacagactgataacgctgagctgggcaggcccaggccagtctagtacaaagttaaggaggtagggaggatggtggggaggagggggcggactaccctgcaggacgcgggaggctgctcagactgtggtgatgtcaggaagggccgcacactttggcatggacgatgcactaaaaaaagagaaagggaattctaaatccctcttaaccagctggagagggaaggacgcagggccagggtggggacaagtgttggcttcggaaggctctgagtggtggggccggaatgtaccatgttgttagcaatggggttgggatgggtggagaagggccaaagtgagctgtgccatgcaatgaagggacagaggaggacccacgacttggccagcagagccggggcaaaagtctgggaaggggagggaaagagagagggactgggtcccaaggcaagaggaaggcagggggagggtcagaggtcagtccttgaagacaatttgttggccatgaggacgctcgtcgtgggtgatatggcgccggacatggatcctgcggacacggtgctctcggttctcttcatcctccccgcggccagccccaccagctccagctgctccccctgtggcctccaggagggctgggtctgggccccggggagtctcgtagatgaggatgttcagggtctcctcgaagatccgggcctctggaaattccacctgcaaaaggccagccggccccagctccttccttctggtgcagtcacgcagggccatccccctgcctagggcccctgcaccaacacacctcctagccctgcagtcaggtccttgggcctggcctggcctctctgccactcctttactcagcaaagtcatacttcaaggctcagctctgaagtcaggcaggcagaattatttgttttctctccttcatctccttccctgcctagcctcttggtatattttttcatttgacaaatactgagtgagtgcactgcaccaggtattgttctaggcactgcaaaaatagcagtgaacaaaacaagagttctgtcctcaggaggttacattctagtgggaggactcagtcatacacttaagaaaatataaactagcctggcgcagtgactcaggcctgtaatcccagcactttgggaggccaaggtgggaggacagcttgaggccaggagtttgagtctagtctgggcaacatggtgtaaccccatctctaccaaaaatacaaaaaattagctaggtgtggtggcccacacctgtgttcccagctactcgggagactgaggtgggaggatcacctgagcatgggaggtggaggttgcagtgagccaagattgtaccactgcactccaacctgggtgacagtgagaccccatctcaaaataaataaataaataaataaaataaaatataaatgcagtcaaatgatgatgtttaggaaacgatataagctgggtgtggtgtctcctgactgtaatcccagcacattgggaggctaaggcaggaacatcgttagagcccaggagttcaagttcaaagccagcctgggcaatgtagcaagacctcatctattaaaaaaaaaaaaagagagagagagagaaagagatacatcaggaaaagagatacatcaggaaaaggggatgtgatagccagagccaggagtgttacaactttaagaaggactccagggaaggcctcactgagaaggtgatatttgaccaaaggagtgggggaggggacaaggcacacagagcagaaagagcagcctggggagggccagggccagcgtgagagctgtgggtcaggagtgcacccagtgtcttactggaagatcaaaagggaggccaatgcaattgaggcagagatgagagggaatggaaagggatgaagtcgaagaggtgactggggtgttcccttgtgtggccttggaagcatctaacacagctcttagcaaactgtttttttaattttttatttttattttttattttttcctgagacagagtcttgctctgtcacccaggctggagcgcaatggcacaatctcagctcactgcaacctccacttcccaagttcaagcgattttcctgcttcaacctcccggagtagctgggattacaggcatgtgccattatgcccagctaatttttggatttttagtagagacagggtttcaccatgttgtacaggctggtctcgaactcctgacctcgtgatctgcccgcctcagcctcccaaagtgctgggattacaggtgtgagccaccatgcccggccttttttttttttttttaatcgttgtttgtttgtttctaagacaagatctcactctgttgcctaggctggagtgcagtggtgtgatcatgtatccctgcagcctcaacctcccgggctcaagtgatcctcccacctcagcttcctgagtacctgggtgtaccactatgtccagttaatttttttttattttttgtagagatggggtcttgctgtgttgcccaggctggcctcaaactcctggccttaatggtcccctgcctcagcctcctaaagtattgggattacaggtgtgagccatgcactctaattattggtttatcttcctatcttcccaatcagaggatgtttcttggaagctgggtcactgattcattcattcattcattcaataaatgtttcctagcttccactgtgtgaaaagggcccagctaatgggagataggaaagaaaaagacatggccctgccctcaaggaactaacacctcgctgctgatgcaaaccccctcccctccaccacacatgataaaacactgtctttagctatgaagggagtgtgaccaactttggggttgctggattgaaagttcatgagtgaaggtgacccaaagaaagtgatgcttagcttgagtcttaagattaagtacaagttcattaggcagatagaaggaaagaattccaagaggcaacagtgtgtgcagaggtaagaggtaagaaatagcactgagtgcttagagacttgtgatgactgtggtgtacctgaggcatgtggctcatagtaagctcggaagggaccagatgaggaagggcttgtattttgctcagcacttcattccccttgatttccagcccggtacagtacttagcacagagcaggggcttggggaatatcttgatgattgccacattaatgactcaggatctacaaactcagaggatgttctaagagacatctgattctgaggttttaagaatctatttttggcaatgggcctttctgagtttcccttttttttttttttaattagagttagggctcactctgtctcctaggatggagtgcagtggcatgatcatagctccctgctgcctcaaattcctgggctagggcgggcccggtggctcacacctataatccaagcactttgggaggccgaggagggcagatcacttgaggtcaggggttcaataccagcctgaccaacatggcgaagtctctactaaagagacttctctactacatttagtctctactaaaaaatacaaaaattagccgggcatggaggcgggtgcctgtagtgccagctacttgggaggctgaggcaggagaatcacttgaatctgggaggcagaggttaagtgagctgagatcacaccattgcactgcagcttgggcaacagagtgagactctgtctaaaaaaaaaaaaaaaaaaataggctgggggcagtggctcacgcttgtaatcccagcactttgggaggctgaggtgggtggatcacgaggtcaagagattgagaccatcctggccaacatggtgaaaccccgtttctactaaaaatacaaaaattagctgggcatggtggcacgtgcctgtagtcctagctactggggaggctgaggcagaagaatcgcttgaacctgggaggtagaggttgcggtgagcggagattgtgccactgcactacagcctggtgacacaacgagactccatctcaaataataataataataataataaataaataaattactgggctcaagcaatcctcctgccttagcttcctgagtagctgggattacaggtgcatgccatcatgtcaccaagccaccacacctggctaaattttttgacttcttacagagatcaggtcccacgatgttgcccaggctggtctcgaactcctgggctcaagtgatcctcctgccttggcctcccagagtcctggggttacaggcgtaagccactatgcctcaccccttctgagtttctaatggcaactatggaccccctatacagaaaaatgcatacacccccatttcaggagttgcaaacagccttgaaacccatccaacaggcctaggctaagcaccctgctctaacccgtgacccccatttcacagagaaacagagacccacagggatagggtggcttgcccactgttgtgcaccccagaccccaggatctggctcctgcctcctggtggtgggctccttcccctgccaacctgcttttgtccagggtcctggtcctggccacccccagcccccaacataggctctggagcccctctgaccttggtctgcttcttctccgtagcatagacaatggaggtgcagcacacctcggcgattttgcggccctgcccgtagaaagaccagcagcagatctcgtcccccaggacatccttgaggaagagtagccgcccgtggaagcgcagggccagcttgtcgaacagctcgatgttcttaagtaggttgtcatctgaagtgctggggaccaggggaccaggaggcctcagcgcagttggcacccctccctctgtacccccagaagacgggcctggatgcattcccagtcctctgctcctgcccagggctttggtgctcaacagagagcctcctccacccctggggccaggctaaacgggtctcagaagggaagccacatgcgctgagcaaatcccagcacagcacagcacagcagctccagtgagggaccgggagccaggccacctccccgggggtcctggtgtccccattttttaactgggtgacactaggcaagttacttcacctcttggtgtcccgacctcctcatctgtaaaatggagctcacaacagtactgacctcaagggggaggactctgccagttcctagaatgagagcacttgggataggctcgccactatcactttgtcctcacccaaacccatttactgatgactgagctgaagctgagaagcagaaaggacctgcctagagcgtcaggggtaagaggcgaagccgaatctgcgagcaggcacagatgttcttgtaggccccccgtgtggccgtggccctcgccttgggcagaagcagggctgtgctgcatcccagggtcccgcccagtgccccgcaccccggcggtcacctggtgtaggagtacttgttgttactgcggttgtgcaggagcttcaccacgggctggcgggggagagaggatggacgagaggggtgaggctgcagggagaggcccccccagtgagcctccaccctgcagggcttgggggcctcaccttggaggtgctggccaggagctgctgctcctcccggggagatgtcaccatggggatgaggcacagcggggacagcgtctcccttttttgctggggaagaagcggaaggtggttaacagcacaaccaaaggccacgtactcccccacttaaaagccttcaaaagctggttgggaacaactccagactcctcagtggtccgcagggctctgcaggctccaagctccgccagcctctctgccactctccctttgcttgctgggccttggtcccacggacaccttgctgcttcacacatccagcttgtgcctgccccggccactggctgtgcccctgcccgggatgcttctttgctcagctgtcagcgtggcgtgtccgtcatgccattcagatcgcaggtcacacagtgcctcctcagggccagccctccccagcccccctggctaaaacagcctcctctacatcctgccttttgtgttatcagttttctttttctttttttgagacagagtttcgcttgttgcccaggctggagtgcaatggcgccatctcggctcactgcaacctccacctcccgggttaaagcaattctcctgcctcagcctcctgagtagctgggattacaggcatgtgccaccacacccagctaattttgtatttttagtagagacgaggtttctccatgttggtcaggctggtcatgaactcccgaactcaggtgatcagcccgcctcagcctcccaaagtgctgggattacaggcgtgagccactgcaccaggcctatcagttcattttctacacagcagttagtgtctgactttttctaactttttgtatttgtttatgatctgtctcttcccacctaggaataactacctagtatacagctgatgctctgtatttgttgaatgaatgaacatatttgttgagtgaatgaacttcattgggtgggatgacgttggagaaagaaatctgaagcaaacccatgggcttctttctcttctgtcttctagaatcttcatgccaaaatccctctcacttctcccaaccttgaaaactcaatgcgcaattctaatacaaattccagatttgttttttgcagaaactcataagactctctaaaattaacagagaataataaaagtctacaattactgaggccattttttttttttttttttttttgagacagggtcttgctgtcatccaggctgagtgcagtggcatgaccacagcttacagcagccttgacctcctgggctcaagccatcctcccaaacttaggtcagtttttaaaaataagagcaaagaggaaaggccgaccctgccagatattaagataggctgcaaagccacaacagtgagaacggtatcagttcgggcacagaaacaaaaatacctgagaaacacaacagagcgatcagaaacagaccactgtgtatatgagaattggtatttttaaaaagacaccacaaatgtgcgaggggaattacggagtatgaattcgttatctatcactgtgtaacaaactgcccccaatttaggagcttaaattaacaatatttattacttctgtttctgagggtcaggatctcagcagtggctcggctgggtggctccggcacagggtctcttctgaggctgtggccaagatgtcagtggggctgtgggcatcaaaggcatgaccgcccctagaggatgcactctgagaaagcttgttcatgtggctggcaagttcgcactagctgctggcaggaaacaacaaatccctgccatgtagatctctccacagggttgcttgagtatcctcgcagcatggcaactggcttctccagagcaaataattccagagagggcaaggtggaagcctcattgtcttttttatttttgagatggagtctcactgtgtcgcccaggctggagtgcagtggcgtaatatcggctcactgcaacctccgcctcccaggttcaagtgattttcctgcctcaaccacccaagtagctgggattaccgaggtgtgccatcacgcccagctaatttttgtatttttagtagagacagggtttcaccatgttggccaggctggtctcaaactcccgacctcaggtgatccactcgcctcagcctcccaaagtgctgggattacagacgtgagccacagcgccgggcccctccattgtcttttatgacctaggtctgttggtcctatccagtgaggaaggagatgacacacaggaacgagcaccaggggacgagaatcatcaggctgccttggtggctggctccacaggccaccgctggctctcagtgatttcccccctcccacatgccaaatatactcaccaccttccaggatcccccatcatcccattacagcatcagctcaaagtacagaatctcatcatctcagtcaggtccaggtggggatgtggctctagcatgcagttccgtaactatggctccttaagtgcatttcttttttttttttttttttgaaatggagtcttgctctgtctcccaagctgaagtgcagagccaccaccatctcacctcactgaaaactctgcttcccaggttcaagtgattctcttgcctcagcatcccaagtagctgggactacaggcatgcaccaccatcccagctaattttctttagtagagacgggatttcaccatgttggccaggctcgtctttaactcctgacctcaggtgatccacttgccttggcctcccaaagtgttgggattacaggcgtgagccaccgcatccagcccttaagtgcatttcctatctgcagacctgtgagctaaagagacaggtcatctccacactcccagtgtgcagtggtagaggcaggcacaggataaccagtaaggacattcttgctcaaaagcaggggaagccgggcgtggtagcgtgtgcctgtcatcccagctactcaggaggccaaggtgggaggattacttgagcccaggagttcgagaccagcctgggcaacatagcaagactctgtctcaaaaaaaaaaaaaagtggggcaggggacaggaggcacatataagtcatacatataagtcactggtgtgtggaaattctgtaatccagttggagaaatgctaggaactctttgatgcctactcctgttcatgaatgattctccatggctctccctgagtcgtcccacctcttccatgaaagatgtttgcagctccacagtttcatctgcctgcttcctgcctgtaaaagtttgggtgtgcaaagccgtcttgtccttttgcactggctctgtccctttcagtccaagctggcagtgtctctgccaatataattctcttcataacttattgggtatcttgcatgtcttagggttcactacattagaaaaaagccacacctagaaatctctgcaagtggccaggcacagtggctcacgcctgtaatcccagcactttgggaggccgaggtgggtggatcacctgaggtcaggagtttgagactagcctgaccaacatggtgaaaccccatctctactaaaaatacaaaaattagctgggcgtggtggtgggcacctgtaatcgcagctactcaggaggctgagacaggagaatcacttgaacccaggaggaggaggttgcagtgagctatctcaaaaaaaaaaaaaagaaaagaaaaagaaaaaagaaaatctctgcaaggtaagcccttctctactttgggcttgtgctgagacgctgaaagacaacacctttaaccttctcagaagcgtgattattatttcattcgactggaagtcccctctgaggcatcttgttggtatttctgaggtcttaacaaaggactttttcatcacatcctcagcttgacctttagaccacatttccctgtatttaatgccttgtatttaatctttgcacggaagccatttgttaattttaacatcacttgttatctggaaaggctgggaattttcaaacccaacaatttcaggctctttttcatttaagtgttttttttctttaacttactctctcctcttcagttttactataagcagcaagaagccaggtggcaccttcaacattctgtctggaaagctccttagctagaccatccgttccttaggtatatttcctaccctccacactaatgcaggagacagtgttgctaaactttctgccgctacacaaggatctcctttccatcagtttccaatagcattttcctaactgttcttcaagcccttattgcagctgtcttaaaggtcactggactcttattaacagactttctcaccttttttcttttaatttttttagagacaaggtctcactatattgctcaggctggtctcgaactcctgaactcaagtgatcctcccaccttggcctccaaaagttatggtattacaagtgtgaaccactgtgcccagccaatactttttaacactccttaagcttttactaacaatctcctcaaagtccttccagcttcttcccacttctcagttgtaaagttacttctacatttgaggtttctgttatggcagacccccattccagaaaccaaagtctgttctctgttactgggtaacaaattactacaaactcagcagcttaaaacaacagtccaggtgtggaggctcatgcctgtaatctcagcattttgggaggccaaggctggaggactgcttgaggtcaggagttcgagaccagcctggccgacagagcaagactctgtctctatttaaaaataaataaataaaaataaacattatctcacatagtttctgtgggtcaggaatttgggatgggcttagctgggtggccctggcccagaatctgtcatgaagctgcagtctggattttggctagggctgcagtcatcagaaggtttgcctgggcctagaagctctggttctgagacaggtcaccactatggcggggagtctgtgcttgctgtcggcaggggcttcagttcctcaccaagtggacctctgcttagggatgcctgagtgtcctcacatagcattcacatagagtgagtgatctcaaagagaggcagaagctgtaatgtcttttatgacctagcttcaaagtcacatgctgtcatttctgcaatgtcctattggtcatacacaagggtctccttggtgaggatctgaaaaggtctgccctatttggtgtgggaggggactgaacaagagcctggaaaccaggaggcaagaacccctggtggctgtcttgggtgctggctacctctggactgtttaatacctggcactgggaaaactacctcaccctatggaagacaaaaatgagctaaatcccttcacaatcatatttacaaaagtgagttccatttagattaaaatacccatatatgaaaaaaatccatatttaaaactataggtcaggtatagcggatcacacctgtaatcccagcactttgggaggccgaagtgggcagatcgcttgagctcaggagtttgagaccagcttgaccaacatggcaaaaccccctttctacaaaaaatacaaaaattagacgggtgtggtggctcatgcttgtaatcccagcactttgggagaccaaggcgggcggatcacgaggtcaggagttcgagaccagtctggccaacgtcgtgaaaccccatctctgctaaaatacaaaaattagccaggcatggtggtgcacgcctgtaatcccagctactcaggaggttagggcaggagaatcgcttgaacccgggaggcagaggttgcagtgagccgagatcatgccactgcactccagtctgggcaatagagtgagactccatttagaaaaataaaaaataaaaaatcagccaggtgtcatggtgcacgcctgtaatcgcagctactcgggaggctgagacatgaaaattgtttgaacctgggaggtggaggttgcagtgagccgagatgacaccattgaactctaacctgggtgacagatcaagactctgcctcaaaaaataaaaataaaactacaaagctcacaggtaacagaaaatcagaaaaacatttttaaacaagaccataaggatacagcattaggcaaaaaatggtgaggaattggactacatccaaatcaagaatttttcaagttgacaatggaaagcatgactttacaaataatctcatgtaataatgttgaagagaaaagacttataggtattctgtggcacaaatgtaattactggttcaggtaaggattatcaatttgtgtgtcattgataggtaactgccttaatacagtggccaaataccatatgcattattttatagttagcaacaaggaaatgtaacaatgatagagaaatcaaaccaccatcccctagatccaggggccaattatgaacgtcattaatgacgagtcatattaacaatattatgggttgcttgatgtggcccaacgtgaaatacatacataatattacctaaaatgtattctaaacaaaatgtttaatatcagtcattttatttattttattatttattcatttattttgagacagagtcttgctctgttgaccaggctggagtgcagtggtgcaaccttgactcactgcaacctctgcctcccaggttcatataattcttctgcctcagcctcctgagtaactgggactacaggcacccaccaccactcccagctaatttttgtaattttttatttatttatttatttatttttgagatggagtctcgcactgttgcccaggctggagtgcagtggcacgatctcggctcactgcaacctctgcctccccaggttcaagcgattctcctgcctcagcctcctgagtagctgggattacagatgcccaccaccaggcctggctaatttttttgtatttttagtagatacagggtttcaccatgttggccaggctggtcttgaactcctgaccttgtgatccacctgcctcagcctcccaaagtgctgggattacaggcatgagccaccgcacctggcataatttttgtatttttaatagagatggggtttcaccatgctgaccaggctggtctcaaactcctgacctcaagtgatccacctgccttggcctcccaaagtgctgggattataggcgtgagccaccgtgcccacccaatatcagtcatttaaaatctacagtctggtttacaggaaattaaggataaggctgggtaataaaccaaacgataccgggagtaaacaaccaggcaaagttggaaagcgggtcattgtgcaggacaactggcagtctctttaacaagccagcatcgtgaggaaaaagggaccccttggattgtaataaagtaatgcttatggtattatttggcttatgtaataaagtaatgcttatggtattatttggcttatgtaataaagtaatgcttatggtattattatggtaactgtattaaggcagttacctatcaatgataatccttacctgaaccagtaattacattcgtgccatagaatacctataactcttatcatctcttcaacattattacatgaaactatttgtaaagtcatgctttccattgttaacttgcagataaccagatgcaacgtgaagatctagactggaccctggtttgatgaaccagctgtaaaaacacatttctggaacaactggagaaaccggagtatgccctggactggatattaaataaaaatttattgacatgtaaagatggcaattattaacaacaacaaaaaacagattataaaacatttcatacaacacgattgtattttggcaagcaaacacacacacacacacatactctcacacaggaaacgacctggaagaatatttggtgcttttattttttagattatttgtgtttctgaaatttctacaattaataaatactgctttaaaataa

SEQ ID NO: 153 - DNA, 14866 bp, Homo sapiens
acagaacacggggtgcctggaaggggaacagatgtgttgtggggcacagggcaggctgggaggggaacaaaggtccactccatgggtaaccagacccttccgccagggctggccacttctgcctttggaaaatgtttcacaacgccccatgttgtgtgtgtgtgtgaatcggccgatgtgaaccgaatgttgatgtaagaggcagggcactcggctgcggatgggtaacagggcgtgggctggcacacttacttgcaccagtgcccagagagggggtgcaggctgaggagctgcccagagcaccgctcacactcccagagtacctgaagtcggcatttcaatgacaggtgagtagtggcccctagggacagagcctgattggggggtggagtggaggagatcactaggctggtggagacttgaggaagcaagaaagcccttggtcccctgtggaagcctctggtcccccgtgggagtcctagtctagaacacagttctggacaccagactcaatctcactgggtggagtccttcacacccctaagcggtctacctttcctttgtctgaagtccgtggatcaaagcccctggagctttctgggctgccggagaaggtgaggggtccagccaaggggcagacatgtggcctcagcttgcccttcttagagcctagggtctctctgcattctctgtggcaggagatctgcctctgggcatctgtcctcacatgagaggacagtaattctgaagctgccatgtcccacacatctggaatgtttgtttgagaggtggaggtgatggacccaagatgggggccagggaccttagtttctccacttttccgggaggaggagggaaaggatcaggcggctttaactctgggccaccagaaagaggcaggacactcaccatgcttcatgggcccccacaggtgacaagggtccccaaaggctaagcgggtccagctatggttccatctccagcccgaccagcccgaccagcccagggccacagcaagcacctcccagagagacctacctgagtgagaagatccccatcccagacacaaaaccggtgggatgctggaaacttcctgggggcttgcaagattgacaggatcctgaaggatcccatgggctggagaatggggtctccttatgatcatgggtggcaagtcccttccaggtctgagcagcagtggtggacagtggcaactgccccttcctgcttccgtccccagtgcttagctggggtgcttcagtatttgtctaaaagcgattaaatgactttctcaatgaatctcagctttcctatgaaggaaaagaggcccagggggaattgggattggagccttgaggacatgttatagcatttaggaaagggcatagggagaagtgaaggaggctgcaggctggcatctagcatctaggatgctgtcacctgcatttccagtatcttctctttttttggagatggagtctcgctctgtagcccaggctggagtgcagtggcgcgatctcagctcactgcaacctccgcttcccaagtttaagcgattctcctgccccggcctcccgagtagctgggattacaggcatgcaccaccatgccaggctaatttttgtatttttactagagacagggtttcaccatgttggccaggctggtctcaaactccttagctcaagtgatccacccacctcggccttccaaagtgctgggattacagacacgagccaacgctcccagcctccaatatcttcagcagatttctaagtcaatatgccatgctctggaacagggtggggggaccatagcctcagcggaccacagagaggaggccccgtggtctgaaaaggagctggcaagggaggagctgggctagggaagcttggccccctcacccccttagacagccccctgtgaggtctctgaggacctgacaagtcagggcttgaggggcaggcagttcaggtgcaagccggctgctgagcttaacagatccagaaaaagatcctctgtgactcatcagagcatgctgcttcctccacccatgccctccccatcccttgggtggcagacccaggaatgggccatggagggcagggctgggctgatgagcctgttggggctcctctaggggatggccaaggccagctgccaccatccctatacccaggaccccctcactctactcctcccaccccccaacagggcaccttcagcctgcggaagctatgggccttcacggggcctggcttcctcatgagcattgctttcctggacccaggaaacatcgagtcagatcttcaggctggcgccgtggcgggattcaaagtaactaagtcgggacctgagtggggacactttcgagagggaggtgaccaggctaagtgttgaaggcccctgctggccatgtttctccaatgtggcctgggagctggtgttaagttcaaatgggcccgaaaagggtccccagggcagccctgccagaaggtggggcatttgtgtggggggtaggggactggactcctctctttaaaatatatatatgtatatttatttatttatttatttaattttattttttgagactcagtctcactcggtcacccaggctggagtgcagtggcacaatctcggctcactgcaacctctgcctcccgggttcaagtgattctcctgcctcagcctcctgagtagtgcatgccaccacgcctggctaatttttgtatttttagtagagatggggtttcactgtgtgggccaggctggtcttgaactcctgacctcaagtgatccaccgcctcggcctcccaaagtgctgggataacaggtgtgagccaccttgcctggcgtaatttatttatttatttagagatgggggtctcactatgttgctcaggctgctcttgaactcctggactcaagcaatcctcccaccttagccttttaaagtgctgggattacagggtgagctaccagcgcccagccaggatgggactccatctctcccaccccctccccgaggagtatgcttggttagagggtaccacgagctcaggggctttctgaggctggcctctctggctgaaggcctctccctgcctcctcacagcttctctgggtgctgctctgggccaccgtgttgggcttgctctgccagcgactggctgcacgtctgggcgtggtgacaggcaaggacttgggcgaggtctgccatctctactaccctaaggtgagcttggggggcctggacagggagaaccactggccccaaaccccaaacagccattttcagcttccacgatcaaataaatacatcatctcacatggggcatcccaagtctgtttgtttttgttgttgtttgtttgtttttcagtcggagtctcgctccgtcgcccagtcaggagtgcaatggtgcgatgtcagctcactgcaacctctacctcccaggtacaagtgattctcctgactcagcctctcaagtagctgggattacaggcgcccaccaccatcatcggctaatttttgtatttttagtagagctggggtttcaccatgttggccaggctggtctcaaactcctgacctcagatgatccacccacctcagtctcccaaagtgctgggattacaggcatgagccactgcatccggccccaattccatttgatagatggaaagactgaggctcaaactgatagcacatagcctagagggacatgagaggcatgtcatttcacagaaggggtaattaaaatttgggaaagagacttgcccaagacaaaaaatggggaggcatcagctcaggaatggtcactggttggggtggaccctggggacttcgttgttgtgagtgtccagtttggaaaacagaaattacagcactggacatttcaaaggtattgaatgcagggattgaaaggtttgggagggcttgaggggcaagggaagagggtgttacaaaaagatcagaaagctgctacacctctggcacaagccccagagccatcctttgctgctgagctcctggaagcattattgatgctgatgaaatggccactagtgctgccagagtccgggttgcctggtgccactgccagaaatacaagaagcagggggagaaaatggtttatctcagcctggggcggtggctcacgcctgtaatcccagcactttgggaggccaaggcgggtggatcacctgaggtcgggagttcgagaccagcctgaccaacatggagaaaccccgtctctactaaaaatacaaaactagccgggcatggtggcacatgcctgtaatcccagctactcgggaggctgaggcaggagaatcgcttgaacacgggaggcggagattgtggtgagccgagatcatgccattgcactccagcctgggcaacaagagcaaaactctatttcgaaaaaaaaaaaaaaagtttatctctgcctttccatctcctgtatgctcttcctacataaggtaggaagcccattggccagactgtctagtaaatgtagtctgagacgacagacaaatgtagtctgagacgacaggcaaataaccggcccacccttaatgaaggatcatctcctccccataggtgccccgcaccgtcctctggctgaccatcgagctagccattgtgggctccgacatgcaggaagtcatcggcacggccattgcattcaatctgctctcagctggacggtaccaccccagtgtaccccaactcttcaggccaggcagagaacagctgctgctacttccccccctaaccagtccctcccagagtctattttatcctgctgtcccctctgaagcagggctgctgccctgttttccagaaatgtaaagtgacttgtctaaagtcacacagatgtgagtcatgcaggactttgggactgcagccccaaactccctgctgcgccgggtgccaggtctctcctctagctctgccctgcctcgactgttctatgccacactcccactccccttgccctagctgtctgggggcgcttagggtcctgctcccaggaggccagattcctgtctccagccctgaggctccgtaggagttagagacccctggaccaggctgggctgacccgggccactctggtttcagaatcccactctggggtggcgtcctcatcaccatcgtggacaccttcttcttcctcttcctcgataactacggtgggtgcacaccccacctcataggggagtggtggtggtgagggtgctgtactgggagaagggctctgacatcgaacagcctgggagcgcacctgagctccctcactctccctgggtggcctctagcgagttacttggacgtgcctctcttcacctgtaacatggggaaataatagcacagacttcagagggtggttgtgaagactgagtgaggtaacatatgttaagcacttggcactgtgcctagaagcgctcgtagtattagccattacgaattgttgatgtcacagatttttttcgttggtttgtttagtttgtttgttctgctccgtagggctgcggaagctggaagctttttttggactccttataaccattatggccttgacctttggctatgaggtaggaagccagtgctgcaaccccactgtggacctcccaagatcattcctctcccttccctctggccgcgggctgcggggggctggggtgggatggaggctgagaaatggtgaccgcggcgtggttgcgaggggcggggcttgtcctgaccaggctcctccctgcagtatgtggtggcgcgtcctgagcagggagcgcttcttcggggcctgttcctgccctcgtgcccgggctgcggccaccccgagctgctgcaggcggtgggcattgttggcgccatcatcatgccccacaacatctacctgcactcggccctggtcaaggtgagcagaggggaggggaaaggagaccccctcactcagtcggagccatgctggctccgcctccaagcctggagcccctcccctctggctccttccctcaggatttgcggagcctgtaataattgagggacaggcggggcgccatggctcacgcctgtaatcccagcactttgggaggcggaggcgggcggatcacgaggtcaagagatcgacaccatcctggtcaacatggcgaaaccccgtctctactaaaaatacaaaaactagctgggcgtggtggcgcgcgcctgtagtcccagcggctcgggaggctgaggcaggagaatcgcttgaacccgggaggcagaggttgcggtgagccgagatcttgccactgcaccactccagcctggcgacagagcgagactctgtctcaaaaaaaaaaaaaaaagaaaagaaaaagtgtctactgtgcgctgggaggaacagaccgtcaaggcctctgcccttctagagtttccgtgctagtggggtagacggatgacaagcaagtaaaccaacaaaggaaagaattataggccgggcgcagtggctcacgcctgtaatcccagcacttcaggaggccgaggcgggcgggcggatcacgaggtcaggagtttgagacctcaacagcctggccaacatggtgaaatcccgtctgtactaaaaatacagaaaattagccggaagtggtggcgcgtgcctgtaatcccagctactcgggaggctgaggcaggagaatcgcttgaagccagtaggcggaagttgcagtgaggggagatggtgacattgcactccagcctgagtgacaaagcaagactccgtctcaaaaaaagaaaaagaacaagaactatagagctgggcgaggtggctcacgcctgtaatcccggcacttcaggaggcagaggcaggtggatcgcttgagcccaggagttcgagaccaccctgggcaacatgataaaaccctgtctctaccaacaaaaaataaaaaataaaataaattagttgggtgttgtgcacacctgtagtcctagttactcaggaggttgaggcttgagccctggaggtcgaggctgcagtgagctgagatcccaccactgcactctcagtgacacagtgagaccctgtcaaaataataataataataataataataattgcgaaagggactctgaagtaaacaaaacagagaaatatgatagagaatgactgaaagttggggaagtagatcagggaaaagatattacaagcggagggaaagcaagtgcaaaggccactggcagaagtgaacaaggcttgggtccctaacagcttaacagtggctcacacctgtaatctcagcattttaagaggccaagacaggagaatgcttgagcccaggagttcaaggctagcctagcaagaccctgtctctgcagaaaatttaaaaattagcgggttgtagtggtgtgtgtctgtggtcccagctacttaggaggctggggcaggaggatcacttgggcccatgagttggaggctgcagtgagccatgcattgcaccacggcactccagtctgggtgacagaacaaaacctgtctctaaaaaataaaataaagtaagctggacacgtctgaggatggaacaaggtgagtgaaggagcgtgtcaggacctgaggtagccagggacctcaaaggccagccttgcttcacccacacagtggcttacagtggtaaggcctctgtggcaagaacagagatgtaggaaaccatcggctgacctgaacctgccccagactgccacgcaggggacttaagaaggtactgggctttggggagaacatagaagtgtgagggtgggggacactgtggtggctctgagggactttggcacttccctctccctttgatcttcgtagtctcgagagatagaccgggcccgccgagcagacatcagagaagccaacatgtacttcctgattgaggccaccatcgccctgtccgtctcctttatcatcaacctctttgtcatggctgtctttgggcaggccttctaccagaaaaccaaccaggctgcggtgagacacactttcccccgcacctgaggccacacacgtactcatgtcctgtaagccttgccgaggaccctaggcaatgcagctgagcccttctgagtctctgccctgatgatcttccctgttggcagatatcattcattcagcaaataatcattgagcatttgttatataccaagcacatcctagaccctggggatacagcagtcaatgctacaaagacccagctctctgcagcttaaatagggagggaggtgagcagacaggaatgaatacccaagggaagtacagagtgggaagaaataaagggggtgaagaagcatagttgggggtatgggggtggggtctgcattagcccaggtggtcaggaaaggcttcttggaagagatgacatttgtgctaatactggaaaaggaactagccagctcctccctgactctctgggatctgggacctgtgtctgtctccccttctgagtggatctcagtcatgaggctctaacaactgcagccagggttgggggcttcctgaatgctgagccctgtgggagaaggggtggccaggcctccaaggacctgggcactgccactgccttgctctgtgaccttgggaggtcacactcctccctgggtctcactctgttccttggcacaaggagggagatcaacatcaggactgcaaacccttgtcttcaagaccaggcaggcgcagagttgtgggaagtggacagtgtgaagagggcatggcagccagctgtctctgtggtgatgccagctcttacgaacctaaaagaagctggaaactgggttcttatgccaggccttctcaattttaaatgttggcaacaaatccacattaaagaaaaaaaaaacccggccgggtgcggtggctcacgcctgtaatcccagcactttgggaggctgaggcagatggctcgcttgagcccgggagttcaagaccaacctgggcaacatgacaagacccccatcgctacaaaacgtaaaagtaaaacaaaacaaaacccaacttattttgttagccaaacaaaatatgtctggccagattcagccttgggccaccagttttggaaccctggtcagtgctaggcagtccagtttcccaaggctgagcgtgctcctcacatcttccttctactgccctggtacccacagttcaacatctgtgccaacagcagcctccacgactacgccaagatcttccccatgaacaacgccaccgtggccgtggacatttaccagggggtgagcgcgggtgggtggggagggcgtgacccagagaggctccccgcctcgggcagggccaccggtcctaccacactcgtccctgcagggcgtgatcctgggctgcctgttcggccccgcggccctctacatctgggccataggtctcctggcggctgggcagagctccaccatgacgggcacctacgcgggacagttcgtgatggaggtagggcagggggcgggcccaggagggcaaggggtccaaggacagcaggcacactactgggggctagaactccgagccttgtgggtcctcttttcttttctttcttttcttcctttttttttgtttttgtttttgttgttgttgttgagacggagtctcgctcttgtcgcccaggctggagtgcagtggcgcgatctcggctcactgcaacctccccctcccaggttcaagcttctcctgcttcagcctcctcagtagctgggatttcaggcacctgccaccaggcctggctaatttttgtacttttagtagagacagggtttcgccatgttggccaggctagtcttgaactcttgacctcaagtgatccgcctgccttggcctcccaaagtgctggaattacaggtgtgaaccaccgcacccggccaatttttgtatttttagtagagacgcagttttgctgtgttggccaggctggtctcaaactcttgacctcgtgatccgcccgccttggactcctgaagtgctgggattataggcgtgagccactgcgtccggccttttcttttctttctttctttccttttttttgagacggcgtttcgctcttattgcccaggctggagtgcaatggcgcgatctccggctcaccgcaacctccacctcctgggttcaagcaattctcctgcctcagcctcctgaccagctgggattacaggccaccacacccagctaattttgtattttcagtaaagacggggtttctccatgttggtcagggtggtctcgaactcccagcctcaggtgatctgccctcctcagcctcccaaagtgctgggattacaggcgtgagccaccgcgcccggctctttctttcttttttgagacaggatttcactctgttgctcaggctggagtgcaatggcgccatcacagctcgctgcagcctcaacttcagcctcccgagtcattgggactacaggctcatgccaccacaccaggctaatttttaaaattatttgtagagatgtggtcttcctatgtttcccaggctggtctcgaactcctgggctcaagtgatcttcccgccttggcttcccaaagtgctgggattacagacgtgagccaccccactcagctttgtttccttcatgtagcccagagggcgacactataagccccattttacagatgagaaaacagatcctgacagatgaggtgacttgctggaagctgcagacccaggactaacagaagccttttccccaaaactgtttagtcttcagcaaccagctatgggatgggagctccccatttctccccacccatcccctcttgccacctagggacagagctgtcccagttcaacagtggaaaaacagagcatgcccccagggataaatcggttgagggactacagaggatctctcctctggaatccccagtcctgtctactcctcaccaaggagttcacccccaccccagggcttcctgaggctgcggtggtcacgcttcgcccgtgtcctcctcacccgctcctgcgccatcctgcccaccgtgctcgtggctgtcttccgggacctgagggacttgtcgggcctcaatgatctgctcaacgtgctgcagagcctgctggtgagatgcgccaaccccaccagccctgcccactgctgagcgaaacaggacctccagcaacccccacgctgagccttgcatgggcctgccaggccctgtcccaggcacatcttgcctacaaggcttccattgtccccacagccaccctggggggcaggagggtaggaatcaccattatccttcccccctcccaccccccagatggtctccctctgtcacctaggctggagtgcagtggttcaatcatggctcactgcagcctgccctccctgtctctagcaatcttcccacctcaggctcccgagtagcagggactataggtgcatgccatcacacccagctaatttttttttttttttttttgagacggagtttcactcttgttacccaggctagagtgcagtggtgagatcttggctcactgcaacctctgcctcccaggttcaagcgattcttctgcctcagcctcctaagtagctgagattacaagcgcccaccatcacacccagctaattttttgtatttttagtagagacagggtttcatcatgttggccaggctagtctcaaactcctgacctcaggtgatccacccgccttggcctcccaaagtgcaaggattacaggcatgagccactgaggcaggtctaatttttttttttttttaagtagagacaaaagctcattatgtttgttgcccaggctcattattccattttacagatgggaaaactgatgcactcagttaagttactagtggcagggcttggattcaaaccgaagcaacctggtgccagagcccccaaacactttctcctgctttggagcccacaacctgataaggcaggagacggggaagtaggctcagtgtggttagggcagttgagctcacacccacacagagggtgtcaagccacgcccatcttgcccccacccttgccatattctgaggcagaattcctcagcctaggctcctgctgctctccccagctcccgttcgccgtgctgcccatcctcacgttcaccagcatgcccaccctcatgcaggagtttgccaatggcctgtgagtaccccctttcccaagtgctggattgcatcaccacatttcatcctcacagccacccagaggtacgagctacaattctccccattatcccaatgaagccacagaggctgagagaggttaagggacttacccaggttcacacagctagcaagttgaggagccaagactggaatccagggaagagggctgtttctagagcctgagcgcctcactctcgcctcagactcagctcttgccaaatcccgccagtgtgtagcctggagggcccaggaggcaggaggtggggagggggtctgtctgctccaggtcccacagaccagagaagcggcctcagtgtatccccacccccagtgtgggcgctgggagatgaagaggagttgatgcaggtgggccagcagcaaccagccagtcctgagcctctctcgtgtcccccaggctgaacaaggtcgtcacctcttccatcatggtgctagtctgcgccatcaacctctacttcgtggtcagctatctgcccagcctgccccaccctgcctacttcggccttgcagccttgctggccgcagcctacctgggcctcagcacctacctggtacagtagggccaggggatgccttgggaatggatgagggaaggacaagaggcaaccaatggggagggtttggggggacacaatggggcttccccagaggtcttggcatctccccaattcatggttgcccctcccccaggtctggacctgttgccttgcccacggagccacctttctggcccacagctcccaccaccacttcctgtatgggctccttgaagaggaccagaaaggggagacctctggctaggcccacaccagggcctggctgggagtggcatgtatgacgtgactggcctgctggatgtggagggggcgcgtgcaggcagcaggatagagtgggacagttcctgagaccagccaacctgggggctttagggacctgctgtttcctagcgcagccatgtgattaccctctgggtctcagtgtcctcatctgtaaaatggagacaccaccacccttgccatggaggttaagcactttaacacagtgtctggcacttgggacaaaaacaaacaaacgaaaaacatttcaaaaggtatttattgagcacctgcaggcgtgacctgacagcccaagggtgggtggggtgagggcttgaggacttgggcgggacacaggctccaaactggagcttgaaatagtgtctgatgaatgttaaattatctatctatctatttatttatttatttgagacagggaaagggtctccctctgttgccaaggctggagtgcagtggcgcaatcttaactcattgcaacctccaccttctgggttcaagcgattctctttattcagccccgggagtggcgcgcgccaccacgcccagctaatttgtgtattttcagcagagacggggtttgccatgctggccaggctggtctcgaactgctggattcaagtgatccgcccatctccgtctcccaaagtgctgggaattacaggcgtgagccaccaaacccggcctgattaaagttaaataaatactagttcccttctcgtccaaaggagcagggaatgggaaccgggaaggcacgaagtctctaaagcatccagaagacccctacaccagggtctggtccgctcctattcgccgcagcctttctgttccgcctgcaacccattttccagacagtaaaacggcggcgcacttctttctccgtcaggcaccaggtcataaggaacccaagagtctgtgcctctgaggcccaaattatttgctgtttcctcaggggagccggcggccgcgactcccacgccgcgccgttaccgctccctctctgctgactgctccccctaggggcagagacggtcccgacgcccgccatcccgccccggcctcacccctccccgccaggcggaacgacgcggggaggcgggcgctcggggctcgcgccaggggccccagaatccttcggggagagtgggtgggaggaagctgtgtgggcggggagccccctctgccttagggagcggctgggcacccattcgccccattcaggggctgcactttatagacgttccctaggctgtttctaggctcccccaagtccctcctccagcctcgtcgggtccctcagaccccagcccaggacctgcggagggccgcagcgaggagaggccaacaggcctttccctagagttgaacctgggccgggtgttgcacctggaagaacccccgatttcctggggacccagcagggcaggcggcctggctccgcgctcaggtccggacgcttgtttatgagaagaatttcctctttcttaaaagggcaacgatgcgagtgggtccctcaaggagagaagagatgggaccggtctggtgcgacctgggcaagcgctgcagagggtacctgggcaagagggccgcccgcctcctctgggtttggcactggagaagatgggtccatgccagctgaaggaggagatggatgggggacgtttagcgaagaaaggcatctcccagatcctttagcctcctggaagtgcccccgttgtaccccctacacacccctcttggcattgagtgccagtcctctgccaggctctgtgttacaagttggggagggcggcaaagtcccgaattaaagatgtcagttctcaagga

SEQ ID NO: 154 - DNA, 617 bp, Homo sapiens
gatgtcttatcaacagcagcagtgcaagcagccctgccagccacctcctgtgtgccccacgccaaagtgcccagagccatgtccacccccgaagtgccctgagccctgcccaccaccaaagtgtccacagccctgcccacctcagcagtgccagcagaaatatcctcctgtgacaccttccccaccctgccagccaaagtatccaccgaagagcaagtaacagcttcaggattcatcaggagcatgagaggataaggataattggctcacctcgttccacagctccaccttcatcttctcatcaaagcttatcatggattcatagggagcttctttccccttagcctgtgatctgcccatgatgttccctgatagcaaaaggtttcctttctaaggctgccatactgccactgtccaggtggagactgagcaaaggaaccttggctttgtcagttcccagagcttcagcagaaagagctgcagctgtgtgcctgggaaccatcagagaattctgttgatgtgttctgtgtctgtctttcacctgggcatgagcttctaccacctgtgcaattgtcacttttctttcactccctgaataaagtatctatgcatatata

SEQ ID NO: 155 - DNA, 8415 bp, Homo sapiens
cttcctcttccgctaacttcccggcagcgcgccgctcagggtgggggccccgagggctggggccgtcggcttccccctggggatcccccgcttcagagaaagccaagcgttaggcgcagccaaagccgagaggcagcggaagctcccggcccggggtggcgctgggtcagcgggtaccttctcggcggtcccctggccggccgaactcgcgcctggtgtcctgtcaccccgctccccgccctgagtgagcctgtcccctctcaggggcgcgcccgagtcgctccgggttggctgcgccagtccagagttaaactttcagccaatgaaaaagggcgcgaggcgtgacgcacggaaacgtcatgggaattcccccctccggggggccgagaaggggctttcccggccctgagccctgctggcaggcgaggtgtcgcgaccggtcccaggtgggtcgggcgcggagagaagccgcaaccagagccgccgccacggtgagtggctggattcagacccctgggtggccgggacaagagaaaagagggaggagggcctttagcggacagcgcctggggctggagagcagcagctgcacacagccggaaagggcgcgcaggcgacgacactcggatccacgtcgacaccgttgtacaaagatacgcggacccgtacgtacacctgtacctgtgctggcgcacacacggcagcgtccgtgcagtcgcactcgcacacacatgcacacggagacgtgcccaccggtgcactggtgcctgcacccacacccttcacgcacaaactcaagatacgctcacccgtgtccgtacatcaagacaggcgctgacacacacccacactgagaagctcgggattcacctatctacacacatgctcgcttgcacactcatgttgacgccatggacacacaacatgcaaccaagcactacagccgaaacacacttgtggagctgtgatggagacacactcttgtattaggtgggggggggggggggggagcgtgcagagatctccctgtcgcctgcgcgcccagaaccggtgcggtgtgggaccagctgctgttgtgaggtttgggagagagagaaaagagcccactccgaggaggagacacttttcccgcagccccagaatcgcgttctcggggcagaaccccggggcctcccacaggaaagagcccccgcctacaggctgttcgaaggggaggccgtccgacagcaggaatgtccccccaaaagcccccggggtttatcagccgtggcctccctcctggcagaaaatcccaaggttgctccagaccgggggaggggagcgggaggcggacttggccccagactgccagcctcctcccggccgtgaaagaccctcctgttccctgccctggagggaggagggggcttaacccccaccggggcttcccggattctcctagacctctgcccgctgaaaagcagcgggagcccgtagactgtcgagggcctcccgcccctcccgtcgcgagggcggggccagtggcgtcatttccaggcccgccccctccggccccgcctccccttggtattttcgggactttcctaagctgctctaactttcctgccccttccccggccaagcccaactccggatctcgctctccaccggatctcacccgccacacccggacaggcggctggaggaggtcggaccctcccccaaatctgggcccccatctcccgcccacccccatttagatctgaccccctcccccacgccactcctcccaactttaggcgggcgtctaaaattctgggaagcagaacctggccggagccactagacagagccgggcctagcccagagacatggagagttgctacaacccagtgagtcatgccgcctgcccctgacccggccggctgcccctcgtgtctgtccacctgtctgcccgagccccctctgctgccttacacctgtatgctcgcagatgctctcagcctgccagtctgtccatctgtctgcaactctgcctccaaaaggagctttctcttgggtctgaggaggaggggggagtgaccactgaagacttggagatgggaggtggggctgtggggggtgctgagagtcggatgccacccccagtctgtctccaaaccagggtctggatggtattattgaatatgatgatttcaaattgaactcctccattgtggaacccaaggagccagccccagaaacaggtcagcaagttcactaacctcccctagtcctaaagcgggggagggagagcatgtgccctctctctgggggaggggctgggagatcgtggctcagcaaggtctctctgtccccagctgatggcccctacctggtgatcgtggaacagcctaagcaggtgagtgagcaaaagggagggtgtggaatggcttcagctttggggacaaatggggtagtggtagctggctggccatggaggagccattgccgaaggaggccacaggggattggatggtcactgctgctgatcagagtgctgtagtttggttcagggctactaccaggcactgcggtcactgctggcctgggtggtcttccctgatcacaatgctactatgcccttggaccttcagagaggcttccgatttcgatatggctgtgaaggcccctcccatggaggactgcccggtgcctccagtgagaagggccgaaagacctatcccactgtcaaggtgagccaggatggtgctggagggtgggctaagtggacagcatgcccaaggccctgactgacagtccctgcctctcctagatctgtaactacgagggaccagccaagatcgaggtggacctggtaacacacagtgacccacctcgtgctcatgcccacagtctggtgggcaagcaatgctcggagctggggatctgcgccgtttctgtggggcccaaggacatgactgcccagtaggtgccctctacgcctggcccccactggtatgcccgtctgccagtcccaggccccagcccacctccatgagcttagcatctgaccaaggggaaagatgtaggttggccccaaacccaagggcctaagtagaaactccaatggcttccttgaggaagtaaggctgagctgagccctggcaatgggaaaggtgcctcaggaagaaagaactgcatggccaaaggcctccgattctctcttctcagatttaacaacctgggtgtcctgcatgtgactaagaagaacatgatggggactatgatacaaaaacttcagaggcagcggctccgctctaggccccagggccttacgggtatgggtgcagggggtgggtcgggtatgggtgcagggggtgggtgggtcatgggaggtgctcatggaaggagcagggagggagaagcccaggggtcacacatgtacctactgcccagaggccgagcagcgggagctggagcaagaggccaaagaactgaagaaggtgatggatctgagtatagtgcggctgcgcttctctgccttccttagagccagtgatggctccttctccctgcccctgaagccagtcatctcccagcccatccatgacagcagtgagtatcctgattgcctggggtgccaggcctggtggcagaggtggcatgaggggtgacctcaagctgtgcagtcaaacagacccaggtttcagaacctggccctgccacatatgagctgagtgatcctgagcaagtcatttcccccccgaagcttctgtctttagtaaatgtgtatattgggtgtttcctgcagctccaggggttgctgagataaggaatacaaagcccccagcttcttaaatgtggccttggctattgcatcatctcaactaatccatatcccactccatagaatctccgggggcatcaaacctgaagatttctcgaatggacaagacagcaggctctgtgcggggtggagatgaagtttatctgctttgtgacaaggtgcagaaaggtgagactggagcccactttgggcaccaaggacatcgagtataagactggggccagggaagctctagggtaaatggccccagagattccaccgggagctgtggccaagcttccgttttccttgtagatgacattgaggttcggttctatgaggatgatgagaatggatggcaggcctttggggacttctctcccacagatgtgcataaacaggtacccagggctagggcccgggcccgggctgggggctaaattaggctaaggactcactgacaccctgtgtctccctgcaccccccagtatgccattgtgttccggacacccccctatcacaagatgaagattgagcggcctgtaacagtgtttctgcaactgaaacgcaagcgaggaggggacgtgtctgattccaaacagttcacctattaccctctggtggaaggtggagctgggctgaggacctcagggtgctggcggggggccaggctgggctagaagaaggtcccaagagctagatgtggggatgcatgagccaagtcagaagtgcgagggtcccaggaggtgcttcctaggagccggccctgagggctcttctgggaagggcccctgaggcatgacacaataactgggctcaatctcattttcctctgcccccagacaaggaagaggtgcagcggaagcggaggaaggccttgcccaccttctcccagcccttcgggggtggctcccacatgggtggaggctctgggggtgcagccgggggctacggaggagctggaggaggtgagggggtactgatggagggaggggtaaaggtaagagaagctgtggaggaaaaaaatctgggggaggccgggcgtggtggctcacgcctgtaatccagccctttgggaggccaaggcaggcagattacctgagatcaggagttcaagaccagcttggccaacagcgtgaaacctcgtctctactaaaaatacaaacattagctgggcatggtggcaggcgcctgtaatcccagctactcgggaggctgaggcaggagaatcgcttgaaccctgggagacaagaggttgcagtaagctgagatcacaccactgcactccaggctgggcaataagagcgaaactccgtctcaaaaaaaaaaaaaaaaaatctgggagagtcatggctggtgcccgcttcccacagccctgcctgtatccacaggtggcagcctcggtttcttcccctcctccctggcctacagcccctaccagtccggcgcgggccccatgggctgctacccgggaggcgggggcggggcgcagatggccgccacggtgcccagcagggactccggggaggaagccgcggagccaagcgccccctccaggaccccccagtgcgagccgcaggccccggagatgctgcagcgaggtatggactccggggcacgggcggtcggggcgccggggctgaggacctagccctgacccacgccctctgtggcccgtagctcgagagtacaacgcgcgcctgttcggcctggcgcagcgcagcgcccgagccctactcgactacggcgtcaccgcggacgcgcgcgcgctgctggcgggacagcgccacctgctgacggcgcaggacgagaacggagacacgtaggcaacagagggcctggcggacgaggcgcggggtgggggcaggaaagggaccggcacggaggcgggctctgcagttttcggacacgccaggcttcaagtccggcctcggtgttcacaagctctgttcaagctgcttggtctctccaaacttcagtttggtcgaccgtgcaaggggtacagtcatagcacttacctacctcaaaaggtgctgcgaaacgttaagtgcaggcacagcgatgccctgggccacgtgctgggttccatgggccccagcgagggagactatgagggcggtggggccttgaaagcgaaggatgctctgagtggctgggccagactctcgctccccaacccccagaccactgcacctagccatcatccacgggcagaccagtgtcattgagcagatagtctatgtcatccaccacgcccaggacctcggcgttgtcaacctcaccaaccacctgcaccaggtgcgggggcgcctactggggaggtgggaggggttggaaggcaagtgggtctcgggcctggctcaccctgctttcatccccagacgcccctgcacctggcggtgatcacggggcagacgagtgtggtgagctttctgctgcgggtaggtgcagacccagctctgctggatcggcatggagactcagccatgcatctggcgctgcgggcaggcgctggtgctcctgagctgctgcgtgcactgcttcagagtggagctcctgctgtgccccagctgttgcatatgcctgactttgagggtgagctccccatctcacctgactaagggggcaggcggggaccagggagggtatctggccagtgcccagaatggactatgaggtgtcgagattgaatggtcagggctggtccaggggctgccttaagggtcacagctgcaggttgagcatcctgcatccttaggactgtatccagtacacctggcagtccgagcccgaagccctgagtgcctggatctgctggtggacagtggggctgaagtggaggccacagagcggcaggggggacgaacagccttgcatctagccacagagatggaggagctggggttggtcacccatctggtcaccaaggtgggactgaggattgtggaaggagtggggccaagggtggtggaggggccaaagatggtgaaggggggggctggccaaggggaccatgctgtggtgtcaactctcgctgctcgcacccccagctccgggccaacgtgaacgctcgcacctttgcgggaaacacacccctgcacctggcagctggactggggtacccgaccctcacccgcctccttctgaaggctggtcagtctcaccctcaggggcacttgaacagggtggggggaagggagagaggtgcctcccagtcccccgactttgcagtccttaatgtaggcccccaccataccgccccatgacggcctccctctcccaggtgctgacatccatgctgaaaacgaggagcccctgtgcccactgccttcaccccctacctctgatagcgactcggactctgaagggcctgagaaggacacccgaagcagcttccggggccacacgcctcttgacctcacttgcagcaccaaggtgaggccagcccgggactagaagtgctctgagtgacggggtccagagtatctggacttaaagacacaggcttaaggacgaggtgggaggtagtcagaactgcggctgtctccccaggtgaagaccttgctgctaaatgctgctcagaacaccatggagccacccctgaccccgcccagcccagcaggtgagaagcatcaggcatccccagcccgactcctctgactcctcacagaggtctcttctccttcaggacctctgaaggaggcctccctttctctaccctcagccccgtccatcacccctcatggtcctgtctgtcgcttaccttgggagaaaggcagtgttcaggtgtccatgtccccacccaactctggaggtaaatgacatgtctgtatgtgtgtccccctaagggccgggactgtcacttggtgatacagctctgcagaacctggagcagctgctagacgggccagaagcccagggcagctgggcagagctggcagagcgtctggggctgcgcagcctggtagacacgtaccgacagacaacctcacccagtggcagcctcctgcgcagctacgaggtgggttggcctgtgccctgccccctccccagcctcctttcccgatctgagtccaggtgcctccttggccccagggctcccgagcacatgccctaaccatgactcagacctcattcctctgtcttctcagctggctggcggggacctggcaggtctactggaggccctgtctgacatgggcctagaggagggagtgaggctgctgaggggtccagaaacccgagacaagctgcccagcacaggtaaaggggcctccctggaaggtggatctggacctggagggccggaggcctgaggctttgactatcccattcctgtccccatttacccccagcagaggtgaaggaagacagtgcgtacgggagccagtcagtggagcaggaggcagagaagctgggcccaccccctgagccaccaggagggctctgccacgggcacccccagcctcaggtgcactgacctgctgcctgcccccagcccccttcccggaccccctgtacagcgtccccacctatttcaaatcttatttaacaccccacacccacccctcagttgggacaaataaaggattctcatgggaaggggaggacccctccttcccaactta

SEQ ID NO: 156 - DNA, 27272 bp, Homo sapiens
caaggagggatcccacagatgtcacaggtaagataactctcagatgaccgtcagtatttgggaacacattttgcaggcagctcatgcgtttttctccttttctgtcatgacttgccctgtggtggctctactgatggtcagtgtgggaggcagggaaggaacatttcaaaccagtaagtctgatcatagcaattcctactttcttgagaactatgtgccaagcattgagctaagtatttcatgctcatcgtctcatttaatcctcactcacgaggaagatgtatggtgtcactgcacctgtaagatgtgcttgcaaaaacagagttagggaggttgagaaatttgctcaagattacacaactgaggcaggagaatggggaacatgaggcgtgagagagcaaagggaataaaaatcactgggaaccggtaacccccctcacccccgagagtggccagggagagagaggctgcctgagggaaggaagctcggcaggacccgctgcagacccagggccaagggaagtcccgcgggaggaaacgcgggcgcggtggggctggctccaggcacgcgggccaagggcgggagggtcggacacgaagccacaaggctcctttccttcctcctccttcccgtctgccttcttctgcttctgcggcctgatctccgagtccctctgcctgcaggcggcggcagaacgtccgcatctgtccgcatctcagcgctgtcccccaaccgagtcgcgccgcgttttcctcttctgtcgggagagctcgtgctgggaaccgcggggcaggaggacggcccaagctactctcgatgtccttccccagcccacgcctgccccagccacagttcccctggttttcctgaggttctccagctgctcaatgatgggcaggttcatctacagcctggagcagccgcctcctcctcctcctcctcctcctcctcctcctccagaaacacccctttttccttctcctcattcttccttctcattctttctcctcctcactcttccttctcctcattcttccgtctcattctttctcctcctcattcttccttctcctcttcctcttccccttctctttctgttcttttcttcttcctcctcctcctccttttctctttatttttctcctcctcctcctcttctccctcttctttctccttatactcctcctctcctcttactgtacttttttttccttctgctttctctgccctcctcttcctcttcttcttcttcttcttctttttttttttttttttgtggctggagtgcagtggcgcaatctcggctcactgcaacctctacttcccaggttcaagcgattctcctgcctcagcctcagtagctgggattaaaggggtccaccgccaccattccctgctaatttttgtaattttagtagagacaggtttttgccatgttggacagtctagtgtcaaactcctgacctcagatgatccatccacctcggcctcccaagtgttgggattacaggcatgagtcaccgcgcctggtctctttctcctttttttttttttaaagaaaaattgaaatcatggttttctaaaaatccctcctagctctcagcttcaccgaaccacgtcctggtcattgacttgccgtgtgactgctgtgcttcccctgtttccatttccctccatttctccctccttcctccctctgtcacccatgcccggaggagcacgataagggaccaggccgacctgggttccaaccctgcctgctccctgtcctgttgacgctctaattccacttgcagccccactttcctcatttgcatagtgttctcccagtaacaacagcagtcataccaagttctagggttctttcgaggatagtgtgtattcaccgcagtgcatctctgatgcctggcacatcggctgtgctcaagtaatggcagctattgcattacagtgactatggagttaggggaccgcatatggcaaaatgctgatcactgttttgaatttggtttcattcctctaatctcaaatccagtgttttaaggacatgctaaatgctttgtcctggagagctatcttaagggacaaaatcgttttcccagcgtcatctgtgacacatcctgacagtagagagctgcttccaagaagcaatttgaagtgccattatcaggcagggacgggggctctaggggatttcggggtcagcagatatgaaatgaatgatttcatagggctgtcacagagctgtggtgggaatttcccatgagaccccgcccctggctgagtcaccgcactcctgtgtttgacctgaagtcctctcgagctgcagaagcctgaagaccaaggagtggaaagttctccggcagccctgagatctcaaggtctgtccatctgggggagtgggtgggggcactgagaaggggtgagattggaacttttgctccctttgcccatttctagactttttctcctaatatgtaataacttctcttcaatagccctttaaataaacatcaataacttagcctgaagagtttttcactccttagttttgttaccatacaaacttcacatctcaaaacatgtctctgtttaagaaaatgtgttagtgagttgaacagggaggtctttccacatgttagtagttaggtgttcagctaaagggggaagagtgattatgtgatagcttcttcttgaactgaattgtctgatgcccctgacagattctctttgtaaggagtttatttcaggggcaataagtaattggcattattgctggttggtactgcaaagtacctatgaaagtccccaaaagttcttgctattgttatttctgcattttggcagaacatgatggaaaatgcaccctcaaactttggcaaaccggcacaaagctgtgtgtttaatcacgcctgccttgtcctagtggtttctatgaatctgctacttttccgtaatattgcatcattaattgttcctgaaaaaccctgagttatcctcttatagaattgtataagtaatgattgcaatatagataattttgaaaggagaaaccacctttccttggaaatgtttatcttttgcagagtgacatttgtgagaccagctaatttgattaaaattctcttggaatcagctttgctagtatcatacctgtgccagatttcatcatgggaaacagctgttacaacatagtagccactctgttgctggtcctcaactttgagaggacaagatcattgcaggatccttgtagtaactgcccagctggtgagtacccagttatcatgtgcatttgatctgctctgttggaagtatggttcagttagtctagtagtcagggctaacgagctcccttttaaggaaaggaaaatgaaaattcattcatttacaaatgtttattggatgctacaacctagctgtgtgaacacagcaaagtcattcaacctcttgtgccttgactttctcatctggggataataagagaacctgttttataggatggctgggaggatcaaatgaagggcttagaacagtgcatggcacaaggcaagacttcaataaatgttagttttgtgtgtagggctttgtgctccgactgggggcatagcagcgagtaagcgcgtagtaaagggcttaacagagtggggacggtcagtcgcatttaaattttagtgtaggacattgatgtcctcctggatccagtcatattcatctcctacatcaatcaagataatcattttgttttattcaatagataaagtattttctttctgttgatttatttgttacaatatctggtttttttgttttttttgtgtgtgtatgtttttttttttttttttgagacacagtctcactctgtcgcccaggctggagtgcagtggcacgatctcagctcactgcaaccttggcctcccaggttcaagcaattctcctgcctcagcctcccgagtagctgggattacaggtgtgcaccactgcgcctggctaatttttgtatttttagtagagacaggatttcaccatgttggccaagctggtcttgaactgctgacctcaggtgatctgcccgcttcggcctcccaaagtgctgtgattacaggcgtgagccactgcacctggcctgtattttgttatttctaattctgtgattacacaaagaataatcttgcaaatgtattgttttaggaagtcaatcaaactaatgtccaccactgtggcatctagaaaactcatcattcttttataatcttattttattgtaaacttcggaatgccttgggtgacgattgcccattgtcaaacgtgtaccactattgtctgcctttcttaggtacattctgtgataataacaggaatcagatttgcagtccctgtcctccaaatagtttctccagcgcaggtggacaaaggacctgtgacatatgcaggcagtgtaaaggtatgagttcaaagatattttcttcttctagaagatagttgggaagataagcttttctttcccatttactaactgctctcttttgaaaatctcaagtgtcaaagactgattcttctgccaaccagcaggtctaggacaataatatccagtgacagcaattatttgtggactgagctttctaaatattagaggaaacattcatttgacaagagagaagtttttacttacctaaatgtaaaaatgtctttatggagatttaaaagtaaactttaaaattactgggaacactataagtagagtgagcatgatttttactgcagagcataaattcgcttcctggatttggaggtcaagtgtaataaaatgttgggggctggggggactttgtaggtgttttcaggaccaggaaggagtgttcctccaccagcaatgcagagtgtgactgcactccagggtttcactgcctgggggcaggatgcagcatgtgtgaacaggattgtaaacaaggtcaagaactgacaaaaaaaggtacgtttgcgtttctttgatctagtgtagttttgtgacatagacaaacttagctttgatcttgatcctttgaaaataaacaaacagatttgtagaaccttaaagtaacaagggagtatatgatatatcatattttaattaataaaatatttcaattaataaaatatttccgttatttcttcataaatggaaataatttgaaatcagaacatttgttaattgccagaaccattaatcttcacatgttccagacatatacaatactttatgtacaattaaaataaaaactagccatcttagggtgttgtttcaagaattattgaacaatttgtgcagattgcattatggtaatgacttatattaagttcatcacaggaaaagttacaaaatgatgaaaatgcttcccttttattattgctttcatttttaatacaaggttgtaaagactgttgctttgggacatttaacgatcagaaacgtggcatctgtcgaccctggacaaagtacgtataatttcctttagtttatggaataaagaatctgggttaaattttttggaagataaggaatgctatcattgaagcttttttgcacccatcaagtgtagacagaatgtaacatactaataggcagcgtgggaacactgtgaggtcgtagcaactcaataggcaaagtgggcattttctccagaaatagtgcctggaacatctagatcagaattgccagtggaggctgggcacgtgcagtggttcacgcctgtaatcccagcactttgggaggctgagacaggaggactccttgagcccaggagttcaaaaccagcctgggtgagaccctgtctctacaaaaaatcaaaaaattagccaggcataatggcacatgcctgtggtcccagctatagggaaggctgatgaggcaggaggatcacctgagtctgggaggttgaggctgcaatgagctatgatcgcaccatcgcactccagagcagagagcctgtctcaaaagaaaggaaaagaattgccagtggaactttgccgctgtctgcctcttttctgtttccttctcattcctttgctgcctcttatcttctctcattgatcagcctgtctccatgtgttcaatgccagcccctagaatgatacagaagaaactaacaattgctcgttaccctccaaaatgtggcacagacttgggcacacaaggccatcacaggtggtaaaaagccaatagtatacgagagaatgtgactgttgttttgtggaaccagaacttacactgtggtctgtggatgggtgctggtccacaaatggcttgtcctgtgtccccatcgacagtggtgtagggttagagagtaaacatttagaaacttttaaggcaaattggcagagtaatgtggtctgttgactaagaataaaaatttgggcgttgtattttatatgtatttgttctttttccgtttcattttcttactagaaaatcatttttattattttacttttacatttttattgtatttcaaaagtgtattggtttgtaacagactggaaagtgacttttttgagagaaaataaagtgttttgaaacaggaatcatggtatctctctgcttttgtcatttataatttatcagcatcagagtggctgacgaatggaatcatgattcacaagaaaagtattgactattttctcggacttagctgaattctgtctttggaaagtggcttttttaaaaaggtctgtttgtttgttttgtttgtttgtttgtttgtttgttttgagatggagtttcgctcttcttgcccaggctggagtgcaatggcacggtctcgcctcactgcaaactctgcctcctgggttcaagagattctcctgcctcggcctcctagtagctgggattacaggtgcacacaaccacgcctggctagtgcttttgtatttttagtagagatgggctttcaccatgttagccaggctggtctcgcactcctgacctcaagtgatccgcttgccttggcctcccaaagtgctgggattacaggtgtgagccactgtgcccagctggaaagtggctttttaaaaaaggtctttcaatacaaatttttcagagttgttaagtgagtctgcatggaaaaatgggtttgaactgggctctggaggacgggcggatttggggtaggtaaagggacaagggaaaggtgtcacaacaacagcaacaatgatggcgatgatggtgataatgatagctaccatttactcagcgtgtcagatgtgcaagagtgtgtcactgactctcactcgtttgttctttgaaacagttctggcagcacatacaatcctaattttgcagatgagaaaactgaggcttagggaggtttcttttttcttttctttctgagacagcgtcaaactcctgggttcaagtgatcagcctcaaactcctgggttcaagtgatcctcccacctcagtctcccgagtagctggggccacaggcatgcaccatcagttaatttttgtttgtcttttaatttttgtagagatggggtcttgctatgttgctcaggctggtctccaacgcctggtctcaagtgatcctctggcctcagcctaccaaagtgttgagattataggcgtgagccaccatgctggggttacagagatttcttgacttgcccaaagtcattctggaaagcagcagacccagggctcaaaccctggtttgcctgatgctagtgctggacctcctaaccctatgctagccttcatctgtgccggagatggtcaagtccgattaagaaactgggggtgagagactaagcaggcaagacagactgaactaagctgtcactgaacagaaggaagccatggaaagctgcagggagccagatggtcaagtggaagtttttcaaaatatctttgcatcgctttcgaacccagacccatatatctttttcactaggctacttcattgggtgaaaaatgacaaagttttaaaccagaatcttctggacctaagttaattatttaaattattttcattgaactgtctaagctgttctttggatggaaagtctgtgcttgtgaatgggacgaaggagagggacgtggtctgtggaccatctccagccgacctctctccgggagcatcctctgtgaccccgcctgcccctgcgagagagccaggtaactgggctatgcctttacgccaaagtgcgtatcttatggtgattccagattgtatctaaattgccccaatatcatgatatctcatatcaggcacctcccacgtgcattcttcctgaatcctgccctcagggacccagcagttttcttcccaggcatttgttattcagtctgagatacacatttgtaagcggtgccagaggacacttcacccaaacagagtctatatctttatcaatgccaaggaaaggggattatagggtcccatattttttcttttcttttcttttctttttttttgtttttaagagagtgtcttgctctgtgccaggctggagtgcagtggtgcagtctcagctcactgcaatctccacctcctgggttcaagtgattctcctgcctcagcctcccaagtagctgggattataggcatgcaccaccacgcccggctaatttttgtatttttagtagagatgaggtttcaccatgctggccagtctggtcttgaactcctgaccgcatgatccgcccacctcggcctcccaaagtgctgggattacaggtgtgagccaccacgcccgtccagggtcccatattttcttttcttttttctttctctctctcgctttttttttcccccgagagtgccttgttctgtgccaggctggagtgcagtggcttgatattggctcactgcaacctccacctcctgtgctcaaccaatcctcccacctcagcctccccagtagctgggactataggcactcaccactacacctggctaattttttatttttttggcagagtcggggtcttgctatgttgctcaggctgctctcaaactcttgggctcaagcaatcctcctgccttgggctcccaaagtgttgggattacaggcataagccgccacgcctggtccccaggtcccatattttctatgtgctagaaaggataaactgctcaattattaagtttcttttatttttttgggggggtggacagagtctctctctgtcacccaggctggagtgcaatggcgcaatctcggctcactgcaacctctacctcccaggttcaagcgattctcctgactcagcctcctgagtagctgggattacaggcgcccaccacggcacccagctaatttttgtatttttagtagagatggagtttctccatgttggccaggctggtttcaaactcttgacctcaggtgatctgcccaccttggcctcccaaagtgctaggattacaggtgtgagccaccgctccctgccattaagtttctctttttcttttctttcttttcttttttttgagatggagtctcactctgttgcccaggttggagtgcagtggcaccatcttagctcactgcaacctccgcctcccgggttcaagccattctcctgcctcatcctgccaagtagctgggattacaagttcctgccaccactatgttggccaggctggtcttgaactcctgactctaagtgatcctcctgcctcggccttccaaagtgttgggattacaggcgtgagccaccatgtctggcctctttaaaagttttctaagtttactccattagcaggttggagatgcccaaggctgtgattcttctcatgcttagaaatttaccaatgtaaatatatacatgggtgtatgagtgtcaacacatttctgcatgcgtttctccttttgctgtgttttgcaggacactctccgcagatcatctccttctttcttgcgctgacgtcgactgcgttgctcttcctgctgttcttcctcacgctccgtttctctgttgttaaacggggcagaaagaaactcctgtatatattcaaacaacgtaagattaacataatcatattacagctctggcaaggcaaggctttttataatagaaaggaaaatatgattttaaaaaaaattctagaaatgaggttcatatagccccgtggctatcacgcaggggcaatttcgtccctgggaatatttgcagtgtctggagacagttgcagtgttcaccgctcggtggtgatggtggtgattaggggctattgcatctagtgagtagaggtcagcaatgctgctcaactcctaccgtgcacgggacagcctcccagcaaagaatgatgctgccccaaatgtcaatagtgctgaggtggagaaagcttgcatatagaagagcacacctcggttctagaaaaatgacagatttaaatatgctgcagccttggattattgcatgtatgtgtatgtgtgtgtgtgtgtgtatgtgtgtgtgtgcgtgtctgtgtgtgtgtgcgtgtgtgtgtgcgcgtgcgtgcgtgtgtgtatgtgtgtgtgtgcgtgtggaggacactggcaaagaagaatcagaaaaccatgttccctctatgtccctctggttgataaactggcttaaaatgagtttagacccatatttgaggaaggcaaggagaacaaagagggagcttgaagggggtttaacaaatgaattattacagcaccagtatggattacatgaaaaatttcaataatgaatttcattcattcacttgttcaacaattatttctgtaaggtactcagcaagtgcctggcactgagtcagcatccactagacaaaagccattgatatttatttgaaaaagtatatagatggaaggcaatctgttttttgtcttcatggacattaggatgagacataacaggcttaataagacttaataagagggatataataaaaggagctttttgagagcaaaattttaacccaaagcaccatgtaagaccagaatgtgcctatttggagattgttaaaaatatatatgcaggaacagcattagtaaagtctttttttttcttttttgagacagagtttcactcttgttgcccaggctggagtgcaatggcgtgatcccggcttaccgcaacctcctccttccgggttcaagcgattctcctgcctcaggctcccgaggcattacaggcatgcgccaccacacccagctaattttgcatttttagtagagacggggtttctccatgttggccaggctggtcttgaactcccaacctcaggtgatccgcccgcctcagcctcccaaagtgttgggattacaggcgtgagccactgcgctcagccagtaaagtcttatctaataaattatgctaatgtatttaaaggctctttttaaagcaatatagaacttttatacattgtgacctatacagaaaaatgcataaatgtaaagtttaacaaattgttgtaaacaaacattcaaataactctaccagggtaaagaagtggaacataactcattcccgaagcccttggcatgccctttctagatcacagccctctttgcccactactgctaaccacatctagacttgtatggtattaacttccttttgctgtagttttgctacctaataacacagttttattgggctgcttgtgaacttcatacaaatagaatcacactgttttctgtatcttgcttcttctttcaacgttgtatcatgaagattcatccatgttgagttcatctttagttgatttccactgttgcacactcttgttgaatgatgacatcattgttcacctattctagtactgatggacagcgggatcatttccagcttggggttattacatgtaatgacgtttgaatatttttgtccgtgtatctcagcacacgtaaacacgtgtttctggcttggttttgttttttaacctagaaataacgttgctgagctacaaggaacatgtgtatcttggtcgtgaatatgccaaactgttttcctaaatgattggaccccatttacactcccctggcggtaatgagtttcctgttactccacatcccctgataactcttggtatcatcagattatttttatcgatatggtgggtggatagttgtatctcattgtggttttaacttacacttcctggttgctagtgaggttagacgccttttcatgttattttggctatttggatttcctctttagtgaagggcctgatcaagtcttttgagtattttctcataggattgtctgtccttttcttactaacgtataggaagtttttagtctgctgttcatgagctgcaaatatcttttcctattctgtggtttgctctttcattctttttttgaggtctacacctccagtttaaacctctgcgttctcacttaaacctgatttcagttttgtcttttgtttttttgagacagagtttcactgtgtcacccaggctgaagtgcaatggtgcgatcacagctcactgtagcctcgaactccagagctcgagcaatcctcctgcctcagcctactaaatagctgggactataggtgcataccaccacactcagctaatttttaattgatttttagtgtttttgtagagactgggattcacggtgttgtccaggccagtcttaaactcctgggctcaagcgatcctcccacctcggtttcccaaagtgctggacttaatcctgatttaaaggagtatctctgcaacaaagttccatccacaccccagactgcaacaaagttcgttataaaatgcttttcaaaagtatttatgagtaattagtgagtttcaatggaactgtaatccattttttaaaagtttttaggacactccctggtagtctagtggttaggattccgcgctcgccatcacgacccgggttcgattcctggtcagggaagccttccttctggctgggcgctgtggctcacgcctgtaatcctagcattctggggggctgaggcgggcagatcacctgaggttaggagttcaacaccagcctggccatggtgaaaccccgtctctactaaaaatacaaaaaattagccaggcgtggtggtgcatgcctgtaatcccagctactcaggaggctgagacaggagaatcgcttgaacccgggaggtggaggttgcagtgaactgagatcgtgccattgcactccagcctgggcaacaaaagcgaaactccgtctcaaaaaaaaaaaaaaaaaaaggttttaggtcgttcaaaagaactttcaattttgacgtaattatagattcacaggaatttgccaagacaggaacatctctcatgcggtttctgggttccattctccagtacaatggcaaagcaggaaattgacattggcacagtgtgcgtgtgtagttgtttgtccctttatcacacatgtggagttgtataacaaccagcacaataaaatcagaactatccatcaccacagagatctccttccactattcctttctagttaggtcctctacctctccccaccatcccctggcaaccacttatctgtctttcatctctatacttttgttatttaaggaatatggtataaatagaatcatatggtatgtgtcaagctaaatcatagatagagagagcctctctaaaagattatattttttcaggagtagcattgcagtgggaatacggtgggtgtattcagggatgtaaaggtgatgcgagtttttaaaagaaaaaatgaggggcggggcacagtggctcatgcctataatcccagcgctttgggaggctgaggcggatggatcacctgaggtcaggagttcgagaccagcctggccaacatggtgaaaccccatctctactaaaaatacaaaaagttagccctgcatggtggcacgtgcctgtaatcccagatacttgggaggctgaggcacaagaattacttgaacctgggaggcggaggttgcagtgagctgatatcgcatcctgcacttcactccagcctgggcgacagagcaagactctgtctcaaaaaaaaaaaaaaaaaaaaaggaaaaagaaaaaaaagaaaaactgaggagggttatgtaagttattttgaaacaattatcctttgctacaaagatcaataccggcagaagtatttttttgttaagatacagtagccttggtgcaaggttgtggtttctgccatcttttgtgatagttgtttttatcaggcatgcatgcataagaaacccccttcacggccttccctggctccatttgtcagggtttttgtttgtttgtttgttttttggttttttgttgttattgttgttgtttgtttttgagacaggatctccctgtgtcattcaggctggagtgcagtggcgtgatctccactcgctgcaacctccgcctcctgggttccagcgattttcgtgcctcagcctcctgagtagctgggattacaggcagctgccaccatgcccggctatagtagagacggggttttgccacgttggccaggctggtcttgaactcctggcctcatgtgatctgcctgcctcagtctcccaaagtgctgggattacaggcatgagccaccatgcccggcccatttgtcagggttttgacacaagttactccattttgattctgacaactttcacaaacgtgaactttttttaagattttgctttttcactcagcacaatgcccttgatatccatccaagttgctgtgtgtttcaatggttaattctttttccttgctgaatagtattccacgatatgcttgtgccacagtttgttttaccatgcacccattaaaagatattttgtttgcttcctgttttgactattacatataaagctgcgaggaataattatgtacaggttttgtgtggacatgtatttttgtatctctatgataaatgctcaggagtgcaattgctgggctatatgtttggtgcttgtttagtttttaagaagttgtcgaactattttccagaggaagtgtatcattttacattctcatcggagtttctctgcatccttgcttgcattttgcattgccacaatttttatttcagctgttctaataggtatgtagtgacatctcattggggctttaatttgcacttcccttatgggtggacatcttttcatgtgcttattttccatctttatatcttcttcagtgaagtgttgttcaggtctttcacctattttctagttggattatttgtttgttttactgttgagattcaagagttcttcgtatttcccagataggagtcctttggcatatatatggtttataaatattttctcccagtcagtagcttgccttttcatcctcttctcaggctcttccacagagaaaagctatttaattttgctgaagtccagtttatggattttttcatttatggagtcatgtctaagaattcttcactgagtcctgggtctcaaagatttagggtttttttttttcctctatctcttataacttttacagttttctatttcatatttaaatcttgattttttttttctgagacagggtctctgctttgtcacccaggctggagtgcagtggtgtgatcatggcttactgcagcctccacctcctgggctcaagtgatcctccctccttggcctcccaagtagctgggactacaggagtgtgccagcacttgctgtggacctattggactgaacaaaggggggcaaaagcgggaataaaagacgagacaaaagagtatatttggaagaaggggtcagggggcaccttgcctctagtggacaagggccctgagctttacacagccctccgtatttattaggcaaaagagatagtgagaaagcggggatgattgtcgggtaattgtcagttagccgtttggtgtttggttcacagcaggcttgtgagactgcatcctttgaacaataggtgctagatttctcaatagataacttcaaggagccagggagtagcgtccctcagcaaactttttggtggcagggcagtgtgagtttgctcacatcttgcattcgtgatgaacactttgctgtttgatcatatagcctccagtggaatgttgagttggtcacgtctcacgggctttggctctctgcatgcctgggtaatttttttttttattttgagacagagtctcaccatgttgctcaggctggtcttgaactcctggccttaaacaatcctcctgccttggcctcccaaagtgctgggattacaggtgtgagccactgtgcccatgcttgattcgttttaaatttttcgtataaggtgtgagaggttttagccaagttttttgttgttgtttttgttgttggactatggacgtccaattgctctagcaccactagtggaaaacattagtcatccttcattgtacctttgtcaaagtcagttggctgcaattacgtggggctatctggtttccctcttctgttccattgatccatgtgtttcttcttctgccaataccacacagccttgattactgtagttatacataaatactgaaattgggtagagggtggtagtctctcccactttattatttcatttcaaaattgttttatctattctagttcctttgcatttccacatacattttaggataatatctatatctacaaaaagccggctgggattctgataacaattgtgttaaatctgcatatcagtttcgggcaaattgacatctttactatgtgaagtacagtcacatatcacttaatgacaggggtagttctgagaaatgtgttgttaagtgatttcgttgttgtgtgaacatcatagagggcacttatgcaaacctagatggtacagcctactatacacctaggctggatggtatagcctatccctcctatactacaaacctgtcaggcatgtgactgtaccgaataccataggcaactgtaacataatggtatttgtgtagctaaacatatctaaacatagaagaggtaccgtgaaaataatatgatctttgccaggcgcagtggctcatgtctgtaatcccaacactttgggagaccaaggtgggcagatcacctgaggtcaggagttcgagactagcctggccaacatggtgaaaccctgtttctactaaaaatacaaaaattagccgggtgtggtggcgcatgcctgtaattccagccacttgggaggctgaggtgggagaatcccttgaacctgacaggcagaggttgcagtgagccgagatcgcatcactgcactcctggctgggcaacagagtgagacgccattagaaaccaggccacccagcaggaggagagtggtgggcaagcacgtgaagcttcctctgtatttatagcccctccccatgacttgcattaccgccttatctccatctcccatcagatcagcagcggcattagattctcataggagcatgaatcctattgtgaactgcgcatacgagggatcgaggttgcacgctccttatgagaatccagtacctgatgatctgtcactgttccccatcacccccagatgggactgtctagttgtaggaaaacaagctcagggctcccactgattctacattacagggagttgtataattatttcattatatattacaaagtaataataatagaaataaagtgcacaataaatgtaatgtgcttgaatcatcctgaaaccatccccccacccacccagtccgtggaaaaattgtcttccacaaaactggtccctcttgccaaaaaggttggggacctctgctgtatatcactgtagtcttataaacactgtacacttaagctaacctaaatttatttaaaatgttctctttcttcaataataaattaaccttagcttactgtgactttttacttcataaactttaatttttttttttttgaggcagggtcttgctgcccaggctggaatgcagtggcgagatcttggctcactgcagcctgcacctcccaggttcaagtgattctcctgcctcagccccccaagtagctgggactacaggcagctgccaccacgcctggctaatttttgtattagagatggggtttcaccatgttggctaggctggtctcgaactcctgagctccggtaatctgcccacctcggcctcccaaagtgctgggattacaggcatgagccaccgcacccagcctataaacttaaaaaaaattttttttaactttttgactcttttgtaataactcttagcttaaaacacaagcacattgtacagctgtacaaaaatattttctctttatttccttattctataagcttttatctatttaaaagtttttaaattgctttttactttttaaactttttttgtgaaaaactaagacacgaacacacttattagcctagacccacacagagttggtgtctgccacctccacatcttgtcccactggaagatctttggggcaaaaacatgcatgtagctgtcatctcctatgagaacaatgtcttcttctggaatacctcccaaaggacctgcctgaggctgttttacaattaactggtttttgtttgtttgtttgtttgtttgttttttgtttgagaggagtcttgctctgttgcccaggctggagtgcaatggggcggtctcggctccctgcaacctctgcctcccgggttcaagggattctcctgtctcagcctcccgagtagctgggattacaggtgcatgccgccatgcctggctaattttttgtactttagtagagacagggtttcaccaaattgcccaggctagtctcaaactcctgagctcaggcaatccacctgccttggcctcccaaagtgctgggattacaggtgtgagccacaacacccggccttaactggttatatatatatatatatatatatatatatatatatatatatggaatatactatgaaataactataaaaagtatggtatagtaagtccataaactactaacatagtcatttattgtcattgtcaaggattatgtgctgtacataattgcatatgctacactttacacaactggcagctcagtaggttttttacatcagtatcaccacaaacgtgagcaatgagctgtgctgcaatgttatgatggttggacatcacgaggcaataggaacttttcagctccactataatcttatgggaccacgatcatatatgcagtctgtttttgaccaaaacgttgttgtacgctgtatgactgtattctaatgcaggaacatagtatgtctcttcatttatacattttaaaatttatttcaccagcattttgtagttttcactatacaagttctgtatgtgttttgttagatttaggcctaagtaaaaaaaaaattttttagaagtcagggtcttgcttgctctattacccaggcgggagtgcagtggcatgatcacgcctcaatgcagcctcaacttcctgggctcaagtgatcctcccacctcagcctccagagtagctgagactacagtcatgtgccaccacccctggctaatttttaaatgttttgtagagacagggtcttgctctgttacccaagctggtctagaactcctggactcaagcgatcctcctgccttggcccccatagtattgggattacaggcgtgagcccccacacccagtttctggatctaatttagatcttgtattttctcagggttcctctgacatcactctagggaaggaaggaggatgggcagctcgttacggccaggcaggggtggaggaagtttgggttctatgctatacctcctggagggtgagggtctcctttttactgctagacacgtgggagttctagctcccactaggcctcctctgacactaccccaggagggagggggagatgagccttaatcagccgtgagggtggaagtccaggctctctactcagtccttcctggtgggcttgcaggcggagccacggtgttttttgtggtgttttgttagaattgagtggttattgtctagaagtttttggaccaggtgtggtggctcacgcctgtaatcccagcactttgggaggcccagatgggcggatcataaggtcaggagtttgagaccagcctggccaatatggtgaaaccccatctctactaaaaacacaaaaattagccgggcctggtggcgggcacctgtagtcccagctactcaggagactgaggcaagagaaccgcttgaacccaagaggcggaggttgcagtgagctgagatcacgccattgcactccagcctgggcaacagagtgagactccatctcaaaaaaaaaaaagaaaaaaaaaagaagtttgtagtcttgctatgctgcccctttcctggtctcataactagagagtacaagctcctcttagttttttatgtgtttttttgagatggagtcttgctctgttgcccaggctggagtgcagtggtgtaatctcagctctctgcaacctctgcctcctgggtttaagccattgtcctgcctcagactcccgaatagctaagattacaggtgagcgccaccatgcccagctaatttttgtgtttttagtagagacagggtttcgccatgttggccaggctggtctcgaaatcctgacctcagatgatctgcttgctttggcttcccaaagtgctgggattacagatgtgagtcaccacgcctggcctcttcttggtttttgctttgttttgtccacgctattggcatttttagagtgctgcttctctagttcccagtcagagggaaatgaggcagaaagaaacccattgccatgttgtttcttgggtctggagatcctgacccaattggccttcctctctctgcctttctgagaggttttcagcagtactcagcaggacaaatacggaaaacatgacatctcaatctttccagaagagatctccattttgaaattcaacctgggaacaatttcaaaagacatcccgttggtatttctgaacatcttgccagtttttcataagttctaggagatggtgtggttattttttatagcaacaagcatatgaaatcggggtaggactttttgccttgccagtctgtaaataaatatctgcttaggattgaaatttgcggagcagtaacacaaatacttcactaacatgtaaaagaaagcctggcagctcacgcacagatcggttcttggttcctaacagatggaagcagtggggataccttcacaatcctggagtcataacactgcattccaaggaaaccatcggatctcgaatctcagtaaccctcaagacgaaaataagtgctgctgaattgaaactagagctatgattgggatatggctaatattttatggtttagtgattcatgcttaagattcatgcttttttagctaatgtagaaaataaagaaaatagttcttaaagaccaatacaaatatttggtaagaggaaacaaatttcaaataatctctagaggaagttcatccttgctgttacctctcttgtggatgagtttgttaaaattattattactattattattataattttttttagatggagtctcactctgtcacccaggctggagtgcagtggcgcaatctcagctcactgcaacctccacctcccaggttcaggcgattctctgcctcagcctcccgagtagctgggattacaggcgcccaccaccacgcccagctaatttttttggtatttttagtagagacggggtttcaccatcttggccaggctggtcttgaactcctgaccttgtgatccaccggcctcagcctcccaaagtgctgggattacaggcatgagccactgcgcccggcctgtttttgttttgttttgttttgttttgttttgttttgttttgttttttgagacagagtttcgctgttgtcacccaggctggagtgcaatggcgccatctcaagtcactgcaatctctgtctcctgggttcaagcaattgtcctgcctcagcctcctgagtagctgggattacaggcacctgccaccacgcccggctaatttttgtatttttagtagggatggggttttgctatgttggccacgctggtcttgaactcctgacctcaagtgatctgcccacctcggccttccaaagtgctggggttacaggcatgagccaccacgcctggctgagtttgttaaaattaaaggggagaatgtttgctgcttagagatgttctgcagctataatttatggaaaataagtgttaaatgattcaaatagacaacaaaatatacgtatcttaaaattttttttttagcatttatgagaccagtacaaactactcaagaggaagatggctgtagctgccgatttccagaagaagaagaaggaggatgtgaactgtgaaatggaagtcaatagggctgttgggactttcttgaaaagaagcaaggaaatatgagtcatccgctatcacagctttcaaaagcaagaacaccatcctacataatacccaggattcccccaacacacgttcttttctaaatgccaatgagttggcctttaaaaatgcaccactttttttttttttttgacagggtctcactctgtcacccaggctggagtgcagtggcaccaccatggctctctgcagccttgacctctgggagctcaagtgatcctcctgcctcagtctcctgagtagctggaactacaaggaagggccaccacacctgactaacttttttgttttttgtttggtaaagatggcatttcaccatgttgtacaggctggtctcaaactcctaggttcactttggcctcccaaagtgctgggattacagacatgaactgccaggcccggccaaaataatgcaccacttttaacagaacagacagatgaggacagagctggtgataaaaaaaaaaaaaaaaaagcattttctagataccacttaacaggtttgagctagtttttttgaaatccaaagaaaattatagtttaaattcaattacatagtccagtggtccaactataattataatcaaaatcaatgcaggtttgttttttggtgctaatatgacatatgacaataagccacgaggtgcagtaagtacccgactaaagtttccgtgggttctgtcatgtaacacgacatgctccaccgtcaggggggagtatgagcagagtgcctgagtttagggtcaaggacaaaaaacctcaggcctggaggaagttttggaaagagttcaagtgtctgtatatcctatggtcttctccatcctcacaccttctgcctttgtcctgctcccttttaagccaggttacattctaaaaattcttaacttttaacataatattttataccaaagccaataaatgaactgcatatgataggtatgaagtacagtgagaaaattaacacctgtgagctcattgtcctaccacagcactagagtgggggccgccaaactcccatggccaaacctggtgcaccatttgcctttgtttgtctgttggtttgcttgagacagtcttgctctgttgcccaggctggaatggagtggctattcacaggcacaatcatagcacactttagccttaaactcctgggctcaagtgatccacccgcctcagtctcccaagtagctgggattacaggtgcaaacctggcatgcctgccattgtttggcttatgatctaaggatagctttttaaattttattcattttatttttttttgagacagtgtctcactctgtctcccaggctggagtacagtggtacaatcttggatcaccgcctcccagtttcaagtgatctccctgcctcagcctcctaagtagctgggactacaggtatgtgccaccacgcctggctaatttttatatttttagtagagacggggtttcaccatgttgtccaggctggtctcaaactcctgacctcaggtgatctgcccacctctgcctcccaaagtgctgggattacaggcatgagccaccatgcctggccatttcttacacttttgtatgacatgcctattgcaagcttgcgtgcctctgtcccatgttattttactctgggatttaggtggagggagcagcttctatttggaacattggccatcgcatggcaaatgggtatctgtcacttctgctcctatttagttggttctactataacctttagagcaaatcctgcagccaagccaggcatcaatagggcagaaaagtatattctgtaaataggggtgaggagaagatatttctgaacaatagtctactgcagtaccaaattgcttttcaaagtggctgttctaatgtactcccgtcagtcatataagtgtcatgtaagtatcccattgatccacatccttgctaccctctggtactatcaggtgcccttaattttgccaagccagtgggtatagaatgagatctcactgtggtcttagtttgcatttgcttggttactgatgagcaccttgtcaaatatttatataccatttgtgtttatttttttaaataaaatgcttgctcatgcttttttgcccatttgcaaaaaaacttggggccgggtgcagtggctcatgcctgtagtcccagctctttgggaggccaaggtgggcagatcgcttgagcccaggagttcgagaccagccttggcaacatggcgaaaccctgtctttacaaaaaatacaaaaattagccgggtgtggtggtgtgcacctgaagtcccagctactcagtaggttcgctttgagcctgggaggcagaggttgcagtgagctgggaccgcatcactacacttcagcctgggcaacagagaaaaaccttttctcagaaacaaacaaacccaaatgtggttgtttgtcctgattcctaaaaggtctttatgtattctagataataatctttggtcagttatatgtgttaaaaaatatcttctttgtggccaggcacggtagctcacacctgtaatcccagcactttgcggggctgaggtgggtggatcatctgaggtcaagagttcaagatcagcctggccaacacagtgaaaccccatctctactaaacatgtacaaaacttagctgggtatggtggcgggtgcctgtaaccccagctgctccagaggctgtggcagaagaatcgcttgaacccaggaggcagaggttgcagcgagccaagattgtgccattgcactccagactgggtgacaagagtgaaattctgcctatctatctatctatctatctatatctatatatatatatatatatatcctttgtaatttatttttccctttttaaaattttttataaaattcttttttatttttatttttagcagaggtgaggtttctgaggtttcattatgttgcccaggctggtcttgaactcctgagctcaagtgatcctcccacctcagccttccaaagtgctggaattgcagacatgagccaccgcgcccctcctgtttttctctaattaatggtgtctttctttgtctttctggtaataagcaaaaagttcttcatttgatttggttaaatttataactgttttctcatatggttaacattttttcttgcctggctaaagaaatccttttctgcccaatactataaagaggtttgcccacattttattccaaaagttttaagttttgtctttcatcttgaagtctaatgtatcaggaactggcttttgtgcctgttgggaggtagtgatccaattccatgtcttgcatgtaggtaaccactggtccctgcgccatgtattcaatacgtcgtctttctcctgcgggtctgcaatctcacctaccatccatcaagtttccatagggccatgggtctgcttctgggctccctgttctgttccattgtcaatttgtctatcctgtgccagtatcacactgtgtttattacaatagctttgtaacagctctcgatatccggtaggacatctccctccaccttctttttctacttcagaagtgtcttagctaggtcaggcacggtggctcacgcctgtaatcccagcactttgggaggccgacgcggatggatcacctgaggtcaggagttttgagacagcctggccaacatggtgaaaccccatctctactaaaaaatacaaaaattagtcaggcatggtggcatgtgcctgtaatcccagctatttgggaggctgaggccggagaattgcttgaacccggggggcggaggttgcagtgagccgagatcgtaccattgcactccagcctgggtgacagagcgaaactctgtctcaggaaaaaaaagaaaagagatgtcttggttattcttggttctttattattcaatataaattttagaagctgaatttgaaaagatttggattggaatttcattaaatctacaggtcaatttagggagagttgataattttacagaattgagtcatctggtgttccaataagaataagagaacaattattggctgtacaattcttgccaaatagtaggcaaagcaaagcttaggaagtatactggtgccatttcaggaacaaagctaggtgcgaatatttttgtctttctgaatcatgatgctgtaagttctaaagtgatttctcctcttggctttggacacatggtgtttaattacctactgctgactatccacaaacagaaagagactggtcatgccccacagggttggggtatccaagataatggagcgaggctctcatgtgtcctaggttacacaccgaaaatccacagtttattctgtgaagaaaggaggctatgtttatgatacagactgtgatatttttatcatagcctattctggtatcatgtgcaaaagctataaatgaaaaacacaggaacttggcatgtgagtcattgctccccctaaatgacaattaataaggaaggaacattgagacagaataaaatgatccccttctgggtttaatttagaaagttccataattaggtttaatagaaataaatgtaaatttctatgattaaaaataaattagcacatttagggatacacaaattataaatcattttctaaatgctaaaaacaagctcaggtttttttcagaagaaagttttaattttttttctttagtggaagatatcactctgacggaaagttttgatgtgaggggcggatgactataaagtgggcatcttcccccacaggaagatgtttccatctgtgggtgagaggtgcccaccgcagctagggcaggttacatgtgccctgtgtgtggtaggacttggagagtgatctttatcaacgtttttatttaaaagactatctaataaaacacaaaactatgatgttcacagg

SEQ ID NO: 157 - DNA, 4242 bp, Homo sapiens
agcggtgcgggccgggcgggtgcattcaggccaaggcggggccgccgggatgctcagggttccggagccgcggcccggggaggcgaaagcggagggggccgcgccgccgaccccgtccaagccgctcacgtccttcctcatccaggacatcctgcgggacggcgcgcagcggcaaggcggccgcacgagcagccagagacagcgcgacccggagccggagccagagccagagccagagggaggacgcagccgcgccggggcgcagaacgaccagctgagcaccgggccccgcgccgcgccggaggaggccgagacgctggcagagaccgagccaggtaagcggcgaggccggggaaggggggcagcccaaggcggacccccagagctcggggtgcagggacgcggggctccgcggcgacaggcagagggaccttcccgcctccgcagccacgcgcgcgcccccggaatgaaccctgagccccagcgtcagggcggcgcaggattctgacaccgcaggactcgcccggctccgtgccctccgctccctggggctcagaagccggcgcgactgcagcgccaccgccctccaccgtcccaggagcggatcccgccccgcgccacccgcgatcggcgccagccccccggtagttatgagaactaataataacttattaacagtgacaaagcaggggttgaccagcaaagcctccgtgtgcttcccaatcccgtgggcagtaaagcggtatattcggggttccctccggtgtccaggagagagagtccacttattttctttcctgtcacttctgatgaggcgaccgaacgcctcgtttagcgaagagggaattaaagcccagaatgagcctgcctctgcgtctccagtggcacaagccctctcttgcccacctggatcctaacaccggatgtcttttggtctggccttcccgggtatcttgttccacggcattttccctgcctccctctcccgcctctcctcagcacacagatccagaatccccatataattctactagacagtagggagaaagttcaaccacgaaacgtctctaactttgggttcttgatgattcttagcaaatgaatgcgtaataaacatatttactcactcttcactccggagagctccttagtcatgtgaaaaaagtgaaatgtatccacgatgacagtgggctgtttgttcactcactaaagagataagggtggattgaattctgttctcttccctgctaacatgtaacttttgtcttcccatccctccttccccactctcctttccagaaaggcacttggggtcttatctgttggactctgaaaacacttcaggcgcccttccaaggcttccccaaacccctaagcagccgcagaagcgctcccgagctgccttctcccacactcaggtgatcgagttggagaggaagttcagccatcagaagtacctgtcggcccctgaacgggcccacctggccaagaacctcaagctcacggagacccaagtgaagatatggttccagaacagacgctataagactaagcgaaagcagctctcctcggagctgggagacttggagaagcactcctctttgccggccctgaaagaggaggccttctcccgggcctccctggtctccgtgtataacagctatccttactacccatacctgtactgcgtgggcagctggagcccagctttttggtaatgccagctcaggtgacaaccattatgatcaaaaactgccttccccagggtgtctctatgaaaagcacaaggggccaaggtcagggagcaagaggtgtgcacaccaaagctattggagatttgcgtggaaatctcagattcttcactggtgagacaatgaaacaacagagacagtgaaagttttaatacctaagtcattcctccagtgcatactgtaggtcattttttttgcttctggctacctgtttgaaggggagagagggaaaatcaagtggtattttccagcactttgtatgattttggatgagttgtacacccaaggattctgttctgcaactccatcctcctgtgtcactgaatatcaactctgaaagagcaaacctaacaggagaaaggacaaccaggatgaggatgtcaccaactgaattaaacttaagtccagaagcctcctgttggccttggaatatggccaaggctctctctgtccctgtaaaagagaggggcaaatagagagtctccaagagaacgccctcatgctcagcacatatttgcatgggagggggagatgggtgggaggagatgaaaatatcagcttttcttattcctttttattccttttaaaatggtatgccaacttaagtatttacagggtggcccaaatagaacaagatgcactcgctgtgattttaagacaagctgtataaacagaactccactgcaagagggggggccgggccaggagaatctccgcttgtccaagacaggggcctaaggagggtctccacactgctgctaggggctgttgcatttttttattagtagaaagtggaaaggcctcttctcaacttttttcccttgggctggagaatttagaatcagaagtttcctggagttttcaggctatcatatatactgtatcctgaaaggcaacataattcttccttccctccttttaaaattttgtgttcctttttgcagcaattactcactaaagggcttcattttagtccagatttttagtctggctgcacctaacttatgcctcgcttatttagcccgagatctggtctttttttttttttttttttttttttttccgtctccccaaagctttatctgtcttgactttttaaaaaagtttgggggcagattctgaattggctaaaagacatgcatttttaaaactagcaactcttatttctttcctttaaaaatacatagcattaaatcccaaatcctatttaaagacctgacagcttgagaaggtcactactgcatttataggaccttctggtggttctgctgttacgtttgaagtctgacaatccttgagaatctttgcatgcagaggaggtaagaggtattggattttcacagaggaagaacacagcgcagaatgaagggccaggcttactgagctgtccagtggagggctcatgggtgggacatggaaaagaaggcagcctaggccctggggagcccagtccactgagcaagcaagggactgagtgagccttttgcaggaaaaggctaagaaaaaggaaaaccattctaaaacacaacaagaaactgtccaaatgctttgggaactgtgtttattgcctataatgggtccccaaaatgggtaacctagacttcagagagaatgagcagagagcaaaggagaaatctggctgtccttccattttcattctgttatctcaggtgagctggtagaggggagacattagaaaaaaatgaaacaacaaaacaattactaatgaggtacgctgaggcctgggagtctcttgactccactacttaattccgtttagtgagaaacctttcaattttcttttattagaagggccagcttactgttggtggcaaaattgccaacataagttaatagaaagttggccaatttcaccccattttctgtggtttgggctccacattgcaatgttcaatgccacgtgctgctgacaccgaccggagtactagccagcacaaaaggcagggtagcctgaattgctttctgctctttacatttcttttaaaataagcatttagtgctcagtccctactgagtactctttctctcccctcctctgaatttaattctttcaacttgcaatttgcaaggattacacatttcactgtgatgtatattgtgttgcaaaaaaaaaaaaaaagtgtctttgtttaaaattacttggtttgtgaatccatcttgctttttccccattggaactagtcattaacccatctctgaactggtagaaaaacatctgaagagctagtctatcagcatctgacaggtgaattggatggttctcagaaccatttcacccagacagcctgtttctatcctgtttaataaattagtttgggttctctacatgcataacaaaccctgctccaatctgtcacataaaagtctgtgacttgaagtttagtcagcacccccaccaaactttatttttctatgtgttttttgcaacatatgagtgttttgaaaataaagtacccatgtctttattaga

SEQ ID NO: 158 - protein, 452 aa, Homo sapiens
QVQLVESGGGVVQPGRSLRLSCTASGFTFSMFGVHWVRQAPGKGLEWVAAVSYDGSNKYYAESVKGRFTISRDNSKNILFLQMDSLRLEDTAVYYCARGRPKVVIPAPLAHWGQGTLVTFSSASTKGPSVFPLAPSSKSTSGGTAALGCLVKDYFPEPVTVSWNSGALTSGVHTFPAVLQSSGLYSLSSVVTVPSSSLGTQTYICNVNHKPSNTKVDKRVEPKSCDKTHTCPPCPAPELLGGPSVFLFPPKPKDTLMISRTPEVTCVVVDVSHEDPEVKFNWYVDGVEVHNAKTKPREEQYNSTYRVVSVLTVLHQDWLNGKEYKCKVSNKALPAPIEKTISKAKGQPREPQVYTLPPSREEMTKNQVSLTCLVKGFYPSDIAVEWESNGQPENNYKTTPPVLDSDGSFFLYSKLTVDKSRWQQGNVFSCSVMHEALHNHYTQKSLSLSPGK

SEQ ID NO: 159 - protein, 214 aa, Homo sapiens
DIQMTQSPSSVSASVGDRVTITCRASQGISSWLAWYQQKPGKAPKLLIYEASNLETGVPSRFSGSGSGSDFTLTISSLQPEDFATYYCQQTSSFLLSFGGGTKVEHKRTVAAPSVFIFPPSDEQLKSGTASVVCLLNNFYPREAKVQWKVDNALQSGNSQESVTEQDSKDSTYSLSSTLTLSKADYEKHKVYACEVTHQGLSSPVTKSFNRGEC
